(19) United States
(12) Patent Application Publication
(10) Pub. No.: US 2017/0067110 A1
(43) Pub. Date: Mar. 9, 2017

(54) DETECTION METHOD FOR GENETIC DISEASE

(71) Applicant: KAGOSHIMA UNIVERSITY, Kagoshima-shi, Kagoshima (JP)

(72) Inventors: Hiroshi TAKASHIMA, Kagoshima (JP); Yujiro HIGUCHI, Kagoshima (JP); Akihiro HASHIGUCHI, Kagoshima (JP); Akiko YOSHIMURA, Kagoshima (JP)

(73) Assignee: KAGOSHIMA UNIVERSITY, Kagoshima-shi, Kagoshima (JP)

(21) Appl. No.: 15/307,061

(22) PCT Filed: Apr. 27, 2015
(86) PCT No.: PCT/JP2015/062701

§ 371 Date: Oct. 27, 2016

(30) Foreign Application Priority Data
Apr. 28, 2014 (JP) 2014-093044

(51) Int. Cl. C12Q 1/68

(52) U.S. Cl. CPC C12Q 1/6883; C12Q 2600/156

(57) ABSTRACT

The present invention relates to a detection method for a genetic disease, and specifically relates to detection of disease-causing genes for autosomal recessive inherited Charcot-Marie-Tooth disease (CMT). In the method according to the present invention, a mutation(s) in MME (membrane metallo-endopeptidase) gene, FAT3 (FAT tumor suppressor homolog 3) gene, and/or SELRC1 (Sell repeat containing 1) gene in a biological sample are/is detected.

### TECHNICAL FIELD

[0001] The present invention relates to a detection method for a genetic disease, and specifically relates to detection of disease-causing genes for autosomal recessive inherited Charcot-Marie-Tooth disease (CMT).

[0002] Research relating to the present invention was conducted under approval of Ethics Committee of Kagoshima University Faculty of Medicine, and informed consent had been obtained from all patients who were subjected to a genetic test and their family members and they had expressed written consent to participate in the research.

### BACKGROUND ART

[0003] Charcot-Marie-Tooth disease (CMT), which is also referred to as Hereditary Motor Sensory Neuropathy (HMSN), is the most representative genetic disease among hereditary neuropathies. Its clinical characteristics include progressive muscle weakness that begins in the distal limb muscle, foot deformity, sensory disturbance, and decreased or absent deep tendon reflexes.

[0004] In clinical genetics, demyelinating CMT caused by disorders of myelin and axonal CMT caused by disorders of axons among autosomal dominant inherited CMTs are classified as CMT1 and CMT2, respectively, and demyelinating CMT caused by disorders of myelin and axonal CMT caused by disorders of axons among autosomal recessive inherited CMTs are classified as CMT4 (AR-CMT1) and AR-CMT2, respectively, and X-linked CMT is classified as CMTX. Demyelinating CMT and axonal CMT can be discriminated by using a threshold of 38 m/sec of motor nerve conduction velocity (MCV) in the median nerve.

[0005] In addition, demyelinating CMT is clinically classified on the basis of age of onset and severity. The severest CMT which causes congenital floppy infant is classified as congenital hypomyelinating neuropathy (CHN), and CMT which develops at a stage between birth to the infant stage (typically, two years old or younger) is classified as Dejerine-Sottas syndrome (DSS). Further, CMT which produces an MCV between demyelinating CMT and axonal CMT is called as intermediate CMT. Thus, CMT is a diverse disease genetically and also clinically.

[0006] Since Lupski et al. reported duplication of PMP22 gene as a cause for CMT1A in 1991, at least 40 CMT-causing genes have been reported, and for example, FIG. 4 gene has been reported as one of CMT4-causing genes (Patent Literature 1). In combination with CMT-related diseases including hereditary motor neuropathy (HMN), hereditary sensory neuropathy (HSN), and hereditary sensory and autonomic neuropathy (HSAN), the number of CMT-causing genes has reached 65 or more. Proteins encoded by currently reported CMT-causing genes are known to have various functions, such as (i) a myelin-component protein, (ii) a transcription factor for a myelin-related protein, (iii) transportation, metabolism, and processing of a myelin-related protein, (iv) cell differentiation and cell maintenance, (v) a function relating to transportation of neurofilaments and proteins, (vi) a function relating to mitochondria, (vii) repair and transcription of DNA and synthesis of a nucleic acid, (viii) an ion channel, and (iv) aminoacyl-tRNA synthetase.

[0007] Currently, duplication tests for PMP22 gene which provide an indicator of CMT1A are conducted by a commercial laboratory with the support of the National Health Insurance in Japan. For a part of other known causal genes, Athena diagnostics, U.S.A., commercially provides genetic test, and Kagoshima University conducts genetic test in Japan.

[0008] On the other hand, progress in the genomic analysis technique through Next-Generation Sequencing (NGS) since 2005 has enabled faster gene analysis at a lower cost. Since a causal gene for Mendelian genetic diseases was identified by using exome analysis for the first time in 2010, a large number of pathological mutations relating to human genetic diseases have been identified, and new causal genes for CMT have been also discovered (Non Patent Literatures 1 to 4).

### CITATION LIST

### Patent Literature

[0009] Patent Literature 1: JP Patent Publication (Kohyo) No. 2010-525819A

### Non Patent Literature

[0010] Non Patent Literature 1: Montenegro, G. et al., Ann. Neurol. 69, 464-70 (2011)
[0011] Non Patent Literature 2: Soong, B. W. et al., Am. J. Hum. Genet. 92, 422-30 (2013)
[0012] Non Patent Literature 3: Ylikallio, E. et al., Hum. Mol. Genet., 22, 2975-83 (2013)
[0013] Non Patent Literature 4: Kennerson, M. L. et al., Hum. Mol. Genet. 22, 1404-16 (2013)

### SUMMARY OF INVENTION

### Technical Problem

[0014] The CMT incidence is considered to be approximately 1/2,500, and incidences for different types of CMT have been reported in part. However, not all of the causal genes have been identified, and thus the percentage of cases the cause of which can be identified by using current genetic diagnosis is 70% or less, except the most frequent CMT1A cases (e.g., PMP22 duplication). Further, demyelinating CMT1A incidence is low in Japan, in contrast to the Western countries, and the positive ratio in the test is significantly low for axonal and intermediate CMTs.

[0015] In addition, the reported causal genes have various functions, and the mechanism of the diseases has not been revealed and proper treatment method therefor has not been found.

[0016] Clinical diagnosis for CMT is comprehensively conducted by neurologists or pediatricians via medical examinations and tests on the basis of clinical course, neurological findings, findings in tests including a blood test, a nerve conduction test, and a neuroimaging test, family history, etc. However, definite diagnosis is difficult because, for example, symptoms presented differ from patient to patient.

[0017] There are many diseases which cause symptoms and course similar to those for CMT, and cases of slowly-progressive peripheral polyneuropathy are all regarded as a subject for differential diagnosis. Examples thereof include chronic inflammatory demyelinating polyneuropathy (CIDP), multifocal motor neuropathy (MMN), diabetic polyneuropathy, and alcoholic neuropathy. CIDP and MMN are each a disease treatable with immunotherapy. In the case of diabetic polyneuropathy and alcoholic neuropathy, proper treatment of underlying diseases and guidance of lifestyle are expected to achieve amelioration of the symptoms and prevention of the progression. CMT patients are often misdiagnosed as such diseases and under a risk of selecting improper treatment. Contemplated is a case that medication, etc., based on incorrect diagnosis worsens the symptoms. It is thus desirable for CMT patients to be provided with definite diagnosis through genetic diagnosis.

[0018] Accordingly, it is desired to discover a new causal gene for CMT cases with unknown cause, in particular for axonal and intermediate CMTs, in order to diagnose, prevent, and treat such diseases. Further identification of causal genes enables reduction of anxiety of patients and their family members caused by unknown cause for the diseases and prediction of prognosis, and as a result can lead to selection of a proper medical care and treatment. In addition, it can lead to pathological understanding of the diseases, drug discovery research, and development of a new treatment method including gene therapy.

[0019] Purposes of conducting a genetic test for a patient clinically diagnosed as CMT include the following.

1. Definite diagnosis can be provided (reduction of misdiagnosis).
2. The prognosis and complications of the disease can be predicted. For example, cases of CMTX caused by GJB1 mutation associated with hearing loss and central nervous system symptoms are reported (Takashima H, et al.: Acta Neurol Scand 2003) and there is a report that climbing (high-altitude environment) and infections are each an inducing factor for the onset of central nervous system symptoms (Henry L, et al.: Annals of Neurology 2002). Thus, patients can be provided with specific guidance of daily life.
3. Invasive tests such as nerve biopsy can be avoided.
4. Selection of a proper treatment method and an opportunity to participate in a clinical trial can be provided.
For CMT1A patients due to PMP22 duplication, clinical trials with ascorbic acid have been already conducted.

### Solution to Problem

[0020] The present inventors extracted cases with unidentified cause from numerous CMT cases, and tried searching a novel causal gene for autosomal recessive inherited CMT from mutation data in exome analysis for an unprecedented number of cases using a uniquely developed “disease candidate gene narrowing-down system”.

[0021] The number of mutations detected per case in exome analysis reaches 10,000 to 12,000 even for non-synonymous mutation only, and thus it is really hard to identify a disease gene among them. In such a circumstance, filtering of mutations is the most frequently used method to identify a causal gene. To exclude pseudo-positive mutation calls, mutations are filtered on the basis of quality, minimal read depth, etc., and from the filtered mutations, mutations including common SNPs which are frequently present, rare SNPs registered in databases, and synonymous mutations which cause no amino acid substitution, are excluded to extract only non-synonymous mutations, splicing site mutations, and insertion/deletion mutations. These operations are considered to be capable of narrowing down the number of mutations to approximately 500 to 700. This is merely insufficient, however, and a further strategy is required to find out a disease-related mutation among them.

[0022] If a mutation which is not found in healthy individuals and is shared only by patients suffering from an identical disease are present in the residual mutations after filtering, it is expected that the mutation is highly likely to be a pathological mutation. On the basis of this theory, the present inventors used an “overlap strategy” to identify a causal gene. For identification of a causal gene, analysis was performed with sufficient consideration of the mode of inheritance of the disease.

[0023] In the case of autosomal dominant inherited diseases, it is needed to search a heterozygous mutation shared only by affected individuals. In the case of only one family, an identical haplotype block is often shared by affected individuals in the family, and thus narrowing down of pathological mutations has limitations. When a causal gene is identified from a plurality of families, identification of a causal gene often works well by searching a gene having a mutation shared among families, if the disease is a monogenic and uniform phenotype (homogeneous) disease. In the case where a disease is a genetically and clinically nonuniform phenotype (heterogeneous) disease as CMT, however, identification of the causal gene is often difficult. The fact that there exist a large number of race-specific rare SNPs is another factor complicating it. Previously, a causal gene could be found out by narrowing down candidate regions using linkage analysis or the like as long as large families having many affected individuals are targeted, even if the number of the families is small. In recent Japan, identification of a causal gene has become more difficult in the case that a few families are targeted because of problems of resources such as smallness of the scale of each family associated with increase in the number of nuclear families and fewer opportunities to receive cooperation for genes from family members living separately.

[0024] In the case of autosomal recessive inherited diseases, on the other hand, the onset occurs due to a homozygous mutation or a compound heterozygous mutation. Thus, focusing only on these mutations enables narrowing down of shared mutations from a relatively small number of candidate mutations. Especially in the case that consanguineous marriage is found in the family, searching with focus only on homozygous mutations is considered to be an extremely efficient strategy.

[0025] The present inventors, focusing on autosomal recessive inherited CMT, screened numerous, 304, CMT (or hereditary neuropathy) cases to exclude cases with family history of autosomal dominant inherited CMT, and thus obtained 179 cases with unidentified cause. And the present inventors succeeded in simultaneous identification of at least three novel potential causal genes for CMT from the numerous mutation data in exome analysis using the above-mentioned “disease candidate gene narrowing-down system” which had been uniquely developed on the basis of the overlap strategy.

[0026] Specifically, the present invention provides the following.

1. A method for acquiring data for diagnosis of autosomal recessive inherited Charcot-Marie-Tooth disease (CMT), wherein a mutation(s) in MME (membrane metallo-endopeptidase) gene, FAT3 (FAT tumor suppressor homolog 3) gene, and/or SELRC1 (Sell repeat containing 1, alias, COAT: cytochrome c oxidase assembly factor 7) gene in a biological sample are/is detected.
2. A method for acquiring data for diagnosis of Charcot-Marie-Tooth disease, wherein a mutation in a DNA in a biological sample is detected, and the mutation is one or more mutations in the nucleotide sequence represented by SEQ ID NO: 1, 3, or 5.
3. The method according to the above 1 or 2, wherein the mutation is any non-synonymous mutation of a missense mutation, a nonsense mutation, and a frameshift mutation.
4. A method for acquiring data for diagnosis of Charcot-Marie-Tooth disease comprising: determining a nucleotide sequence of MME gene in a sample; and comparing the sequence with a nucleotide sequence represented by SEQ ID NO: 1 to determine the presence or absence of a mutation.
5. The method according to the above 4, wherein the mutation is one or more of a mutation on a splice donor site between exons 7 and 8 in MME gene (c.654+1G>A) (a mutation of guanine to adenine at position 37341 of SEQ ID NO: 1), a nonsense mutation on exon 8 in MME gene (c.661C>T, p.Q221X) (a mutation of cytosine to thymine at position 39106 of SEQ ID NO: 1, a mutation of a glutamine residue to a termination codon at position 221 of SEQ ID NO: 2), and a missense mutation on exon 19 in MME gene (c.1861T>C, p.C621R) (a mutation of thymine to cytosine at position 88926 of SEQ ID NO: 1, a mutation of a cysteine residue to an arginine residue at position 621 of SEQ ID NO: 2).
6. A method for acquiring data for diagnosis of Charcot-Marie-Tooth disease comprising:

[0027] determining a nucleotide sequence of FAT3 gene in a sample; and

[0028] comparing the sequence with a nucleotide sequence represented by SEQ ID NO: 3 to determine the presence or absence of a mutation.

7. The method according to the above 6, wherein the mutation is one or more of a missense mutation on exon 9 in FAT3 gene (c.6122C>A, p.P2041H) (a mutation of cytosine to adenine at position 484856 of SEQ ID NO: 3, a mutation of a proline residue to a histidine residue at position 2041 of SEQ ID NO: 4) and a missense mutation on exon 18 in FAT3 gene (c.11327G>A, p.C3776Y) (a mutation of guanine to adenine at position 530415 of SEQ ID NO: 3, a mutation of a cysteine residue to a tyrosine residue at position 3776 of SEQ ID NO: 4).
8. A method for acquiring data for diagnosis of Charcot-Marie-Tooth disease comprising:

[0029] determining a nucleotide sequence of SELRC1 gene in a sample; and

[0030] comparing the sequence with a nucleotide sequence represented by SEQ ID NO: 5 to determine the presence or absence of a mutation.

9. The method according to the above 8, wherein the mutation is one or more of a missense mutation on exon 2 in SELRC1 gene (c.115C>T, p.R39W) (a mutation of cytosine to thymine at position 5508 of SEQ ID NO: 5, a mutation of an arginine residue to a tryptophan residue at position 39 of SEQ ID NO: 6) and a missense mutation on exon 1 in SELRC1 gene (c.17A>G, p.D6G) (a mutation of adenine to guanine at position 57 of SEQ ID NO: 5, a mutation of an aspartic acid residue to a glycine residue at position 6 of SEQ ID NO: 6).
10. A primer or probe for detection of autosomal recessive inherited CMT, being a nucleic acid consisting of a nucleotide sequence represented by any of SEQ ID NOs: 1, 3 and 5 or a partial nucleic acid thereof.
11. A DNA chip for detection of autosomal recessive inherited CMT, comprising the probe according to the above 10.
12. A kit for detection of a mutation in MME gene, FAT3 gene, and/or SELRC1 gene in a biological sample to be used in the method according to any one of the above 1 to 9.

[0031] The present specification encompasses the contents described in the specification and/or the drawings of JP Patent Application No. 2014-093044, on which the priority of the present application is based.

### Advantageous Effects of Invention

[0032] The present invention enables identification of a causal gene for cases which cannot be diagnosed as CMT in conventional genetic diagnosis and prediction of the possibility of future onset for an individual before onset. Further, even in the case of an individual with no possibility of onset due to that the mutation is heterozygous, the present invention enables prediction of the possibility of onset for later generations on the basis of information of having a mutated gene. In addition, it is expected that use of gene therapy with a nonmutated gene prevents the onset and alleviates the symptoms.

[0033] Addition of a novel gene as a causal gene enables reduction of anxiety of patients and their family members caused by unknown cause and prediction of the prognosis, and as a result can lead to selection of a proper medical care and treatment, and in addition, can contribute to pathological understanding of the diseases, drug discovery research, and development of a new treatment method including gene therapy.

[0034] Although a disease before onset or in the initial stage can be detected, presymptomatic testing should be conducted in accordance with the “GUIDELINES FOR GENETIC TESTING” V.3.A. Presymptomatic Testing, which was established by Genetic-Medicine-Related Societies.

### BRIEF DESCRIPTION OF DRAWINGS

[0035] FIG. 1 is a flow chart for screening of cases using a microarray and exome analysis.

[0036] FIG. 2 illustrates narrowing down of autosomal recessive inherited mutations using a “disease candidate narrowing-down system”.

[0037] FIG. 3 illustrates family histories of five families each having MME gene mutation (patient IDs: 4590, 4229, 4309, 3676, and 4185).

[0038] FIG. 4 illustrates a schematic of neprilysin encoded by MME gene and mutation sites.

[0039] FIG. 5 illustrates the family history of a patient having an MME gene mutation (patient ID: 3676) and difference in the nucleotide sequence at a splice donor site in MME gene among the family members. A. family history, B. MME gene mutation (c.654+1G>A at splice donor site).

[0040] FIG. 6A illustrates the family history of a patient having a FAT3 gene mutation (patient ID: 3743) and difference in the nucleotide sequence of FAT3 gene and the amino acid encoded thereby among the family members. Left: family history, right: FAT3 gene mutation (c.6122C>A, p.P2041H).

[0041] FIG. 6B illustrates the family history of a patient having a FAT3 gene mutation (patient ID: 3887) and difference in the nucleotide sequence of FAT3 gene and the amino acid encoded thereby among the family members. Left: family history, right: FAT3 gene mutation (c.11327G>A, p.C3776Y).

[0042] FIG. 7A illustrates the family history of a patient having an SELRC1 gene mutation (patient ID: 4040) and difference in the nucleotide sequence of SELRC1 gene and the amino acid encoded thereby among the family members. Left: family history, right: SELRC1 gene mutation (c.17A>G, p.D6G).

[0043] FIG. 7B shows interspecies comparison of a partial sequence containing Asp6 in the amino acid sequence encoded by SELRC1 gene.

[0044] FIG. 7C shows brain MRI images for a patient having an SELRC1 gene mutation (patient ID: 4040).

[0045] FIG. 8A illustrates the family history of a patient having an SELRC1 gene mutation (patient ID: 4348) and difference in the nucleotide sequence of SELRC1 gene and the amino acid encoded thereby among the family members. Left: family history, right: SELRC1 gene mutation (c.115C>T, p. R39W).

[0046] FIG. 8B shows interspecies comparison of a partial sequence containing Arg39 in the amino acid sequence encoded by SELRC1 gene.

[0047] FIG. 8C shows brain MRI images for a patient having an SELRC1 gene mutation (patient ID: 4348).

### DESCRIPTION OF EMBODIMENTS

### Detection of Mutation in MME Gene, FAT3 Gene, and/or SELRC1 Gene

[0048] The present invention is in particular characterized in that a mutation in MME (membrane metallo-endopeptidase) gene, FAT3 (FAT tumor suppressor homolog 3) gene, and/or SELRC1 (Sell repeat containing 1) gene in a biological sample are/is detected.

[0049] In the present invention, a “biological sample” refers to a sample derived from a subject, and may be any biological sample containing a DNA, an mRNA, or a protein. It is known in the art that DNA information can be obtained from various minute samples such as tissues, body fluids, and body hairs derived from a subject. Although the sample is not limited, saliva, blood, etc., are suitable in view of a lower burden imposed on a subject in sampling. In particular, the subject is a human, but not limited thereto. Those skilled in the art can easily perform DNA sampling, and for example, can extract a genome DNA from the peripheral blood of a subject by using Gentra Puregene Blood Kit (QIAGEN, Tokyo, Japan).

[0050] The present inventors found that a subject having a mutation in any of the above three genes can result in the onset of CMT. The mode of inheritance for all of the three genes is obviously autosomal recessive inheritance, and thus the onset of the symptoms of CMT due to a mutation in the genes occurs if a homozygous mutation or a compound heterozygous mutation is present. The onset occurs because proteins encoded by the genes are not expressed normally or do not function normally, and specific details of mutations found in each patient do not matter. Thus, mutation in the genes to be detected in the present invention is not limited and may be any mutation which does not allow for expression of a functional protein. Examples thereof include non-synonymous mutations such as missense mutations, nonsense mutations, and frameshift mutations, including substitution, deletion, insertion, and duplication of a nucleotide in an exon and mutation at a splicing site; and do not include mutations in an intron and synonymous mutations, which do not involve an amino acid change.

[0051] Mutations to be detected in the present invention may be homozygous mutations or compound heterozygous mutations, or heterozygous mutations in which one allele is normal. In a patient after the onset, a homozygous or compound heterozygous mutation is presumably present in the gene. In the case of an individual in whom the onset is expected to occur or a carrier, a mutation may be present in one or both of the alleles. Whether a mutation is homozygous or heterozygous can be determined by using, for example, DNA sequence comparison according to Sanger method.

[0052] Mutation in a gene can be detected by analyzing the sequence of a DNA, an mRNA (cDNA), or a protein, as described above.

[0053] In one aspect of the present invention, the present invention provides a method for acquiring data for diagnosis of Charcot-Marie-Tooth disease, in which a mutation in a DNA in a biological sample is detected, and the mutation is one or more mutations in the nucleotide sequences represented by SEQ ID NO: 1, 3, and 5.

[0054] In the present specification, “acquiring data for diagnosis of Charcot-Marie-Tooth disease” means acquiring data containing a detection result for the presence or absence of a mutation in a gene in a sample, and the data are to serve to assist a physician to diagnose whether the disease is Charcot-Marie-Tooth disease.

### <Mutation in MME Gene>

[0055] The MME gene is located in the long arm of human chromosome 3 (3q25.2). Neprilysin (NEP), a protein encoded by the MME gene, is a cell membrane-associated protease which cleaves a peptide linkage of proteins at the amino terminal of a hydrophobic amino acid residue, and also called as Enkephalinase or neutral endopeptidase 24.11 (Turner, A. J., Isaac, R. E. & Coates, D., Bioessays 23, 261-9 (2001)). NEP is expressed in various normal tissues such as kidney, skeletal muscle, central nervous system, peripheral nervous system, skin, etc., and in particular in the central nervous system, NEP is known to be expressed even in pyramidal cells in the cerebral neocortex and the vascular smooth muscle of the cerebral blood vessel. In addition, NEP is a major enzyme to decompose amyloid β peptides (aggregates of abnormal, misfolded proteins), and reduction of NEP activity is known to be associated with the onset of Alzheimer's disease. Thus, NEP is one of enzymes attracting attention as a key molecule in pathological understanding and drug discovery research for Alzheimer's disease.

[0056] The nucleotide sequence of the gene encoding the functional MME protein and the amino acid sequence of the MME protein are represented by SEQ ID NOs: 1 and 2, respectively. The positions of exons in the MME gene sequence represented by SEQ ID NO: 1 are listed in the following Table 1.

TABLE 1
Information on exons in MME gene sequence

| Exon | Length (nucleotides) | Position in SEQ ID NO: 1 |
|---|---|---|
| 1*¹ | 110 | 1 to 110 |
| 2*¹ | 170 | 4,512 to 4,681 |
| 3 | 36 | 5,413 to 5,448 |
| 4 | 162 | 35,348 to 35,509 |
| 5 | 81 | 36,833 to 36,913 |
| 6 | 96 | 37,018 to 37,113 |
| 7 | 119 | 37,222 to 37,340 |
| 8 | 66 | 39,100 to 39,165 |
| 9 | 135 | 58,456 to 58,590 |
| 10 | 102 | 60,545 to 60,646 |
| 11 | 137 | 62,345 to 62,481 |
| 12 | 94 | 62,591 to 62,684 |
| 13 | 129 | 63,797 to 63,925 |
| 14 | 99 | 64,713 to 64,811 |
| 15 | 81 | 67,498 to 67,578 |
| 16 | 104 | 68,904 to 69,007 |
| 17 | 59 | 80,744 to 80,802 |
| 18 | 120 | 87,256 to 87,375 |
| 19 | 134 | 88,846 to 88,979 |
| 20 | 66 | 89,086 to 89,151 |
| 21 | 96 | 92,471 to 92,566 |
| 22 | 77 | 92,890 to 92,966 |
| 23*² | 3,349 | 100,714 to 104,062 |

*¹including 5′UTR: 1 to 4,521
*²including 3′UTR: 100,814 to 104,062

[0057] If the functional MME protein is not expressed due to mutation in the MME gene, the onset of CMT is expected to occur. Accordingly, one aspect of the present invention is a method for acquiring data for diagnosis of Charcot-Marie-Tooth disease comprising:

[0058] determining the nucleotide sequence of MME gene in a sample; and

[0059] comparing the sequence with the nucleotide sequence represented by SEQ ID NO: 1 to determine the presence or absence of a mutation.

[0060] As described above, mutation in MME gene includes a mutation on any exon or a mutation at a splicing site which inhibits expression of the functional MME protein, and is not limited to any specific mutations. Accordingly, although not limited to any mutations, examples of mutations in MME gene found by the present inventors include a mutation at a splice donor site between exons 7 and 8 (c.654+1G>A) (a mutation of guanine to adenine at position 37341 of SEQ ID NO: 1), a nonsense mutation on exon 8 (c.661C>T, p.Q221X) (a mutation of cytosine to thymine at position 39106 of SEQ ID NO: 1, a mutation of a glutamine residue to a termination codon at position 221 of SEQ ID NO: 2), and a missense mutation on exon 19 (c.1861T>C, p.C621R) (a mutation of thymine to cytosine at position 88926 of SEQ ID NO: 1, a mutation of a cysteine residue to an arginine residue at position 621 of SEQ ID NO: 2).

[0061] Cognitive decline is not found in any of cases with MME mutation identified by the present inventors in the present research, and they are very similar in phenotype in that the age of onset was in the late stage and axonal motor sensory neuropathy was presented. Although the function of NEP in the peripheral nervous system has not yet been revealed, it is expected that the mechanism for processing abnormal proteins operates abnormally also in the peripheral nervous system, which may result in axonal degeneration in peripheral nerves.

### <Mutation in FAT3 Gene>

[0062] The FAT3 gene, which is located in the long arm of chromosome 11 (11q14.3) and a member of the human FAT gene family, is a gene having high homology to FAT1 and FAT2. The protein encoded by the FAT3 gene is a macromolecule which has an EGF-like motif and a cadherin motif and belongs to the cadherin superfamily as cell adhesion molecules (Tanoue, T. & Takeichi, M., J Cell Sci 118, 2347-53 (2005)). Expression of the Fat3 protein and mRNA has been found in embryonic stem cells, primitive neuroectoderm, fetal brain, infant brain, adult nervous tissue, and prostate, and the Fat3 protein is expected to have an important role in formation and adjustment of an axon bundle in an extracellular matrix surrounding axons in the embryogenesis stage, and has been found to cause dendrites of retinal cells to have an abnormal form in a FAT3 knockout mouse.

[0063] The nucleotide sequence of the gene encoding the functional FAT3 protein and the amino acid sequence of the FAT3 protein are represented by SEQ ID NOs: 3 and 4, respectively. The positions of exons in the FAT3 gene sequence represented by SEQ ID NO: 3 are listed in the following Table 2.

TABLE 2
Information on exons in FAT3 gene sequence

| Exon | Length (nucleotides) | Position in SEQ ID NO: 3 |
|---|---|---|
| 1*¹ | 3,309 | 37,817 to 41,125 |
| 2 | 315 | 210,355 to 210,669 |
| 3 | 62 | 383,105 to 383,166 |
| 4 | 315 | 447,577 to 447,891 |
| 5 | 211 | 450,600 to 450,810 |
| 6 | 140 | 459,762 to 459,901 |
| 7 | 276 | 475,664 to 475,939 |
| 8 | 211 | 478,488 to 478,698 |
| 9 | 4,074 | 483,557 to 487,630 |
| 10 | 197 | 490,874 to 491,070 |
| 11 | 154 | 492,083 to 492,236 |
| 12 | 234 | 495,564 to 495,797 |
| 13 | 390 | 517,343 to 517,732 |
| 14 | 215 | 520,591 to 520,805 |
| 15 | 138 | 522,287 to 522,424 |
| 16 | 144 | 523,384 to 523,527 |
| 17 | 198 | 526,283 to 526,480 |
| 18 | 799 | 529,655 to 530,453 |
| 19 | 135 | 542,935 to 543,069 |
| 20 | 158 | 544,886 to 545,043 |
| 21 | 469 | 552,462 to 552,930 |
| 22 | 154 | 566,452 to 566,605 |
| 23 | 656 | 568,459 to 569,114 |
| 24 | 114 | 572,721 to 572,834 |
| 25 | 60 | 574,910 to 574,969 |
| 26 | 36 | 575,577 to 575,612 |
| 27*² | 5,962 | 576,212 to 582,173 |

*¹including 5′UTR: 37,817 to 37,833
*²including 3′UTR: 576,835 to 582,173

[0064] If the functional FAT3 protein is not expressed due to mutation in the FAT3 gene, the onset of CMT is expected to occur. Accordingly, one aspect of the present invention is a method for acquiring data for diagnosis of Charcot-Marie-Tooth disease comprising:

[0065] determining the nucleotide sequence of FAT3 gene in a sample; and

[0066] comparing the sequence with the nucleotide sequence represented by SEQ ID NO: 3 to determine the presence or absence of a mutation.

[0067] As described above, mutation in FAT3 gene includes a mutation on any exon or a mutation at a splicing site which inhibits expression of the functional FAT3 protein, and is not limited to any specific mutations. Accordingly, although not limited to any mutations, examples of mutations found by the present inventors include a missense mutation on exon 9 in FAT3 gene (c.6122C>A, p.P2041H) (a mutation of cytosine to adenine at position 484856 of SEQ ID NO: 3, a mutation of a proline residue to a histidine residue at position 2041 of SEQ ID NO: 4) and a missense mutation on exon 18 in FAT3 gene (c.11327G>A, p.C3776Y) (a mutation of guanine to adenine at position 530415 of SEQ ID NO: 3, a mutation of a cysteine residue to a tyrosine residue at position 3776 of SEQ ID NO: 4).

[0068] Two cases with FAT3 mutation are different in age of onset. However, severe muscle weakness of the distal lower limb muscle is found in both cases, and the two cases share common, specific central nervous system symptoms (swallowing disorder and tongue atrophy). Although the presence or absence of expression of FAT3 protein in the peripheral nervous system is unknown, FAT3 protein may be involved in the differentiation and maintenance of peripheral nerve cells, and mutation in FAT3 protein is considered to cause some disorder of axon formation, neurite elongation, etc., in the peripheral nervous system.

### <Mutation in SELRC1 Gene>

[0069] The SELRC1 gene is located in the short arm of chromosome 1 (1p32.3) and encodes a sell repeat-containing protein. However, the function is completely unknown. Two cases with SELRC1 mutation are those of juvenile-onset axonal motor sensory neuropathy, and share common central nervous system symptoms (cerebellar ataxia) and MRI findings (cerebellar atrophy) and are characterized in a phenotype similar to spinocerebellar ataxia with axonal neuropathy (SCAN1).

[0070] The nucleotide sequence of the gene encoding the functional SELRC1 protein and the amino acid sequence of the SELRC1 protein are represented by SEQ ID NOs: 5 and 6, respectively. The positions of exons in the SELRC1 gene sequence represented by SEQ ID NO: 5 are listed in the following Table 3.

TABLE 3
Information on exons in SELRC1 gene sequence

| Exon | Length (nucleotides) | Position in SEQ ID NO: 5 |
|---|---|---|
| 1*¹ | 146 | 1 to 146 |
| 2 | 141 | 5,500 to 5640 |
| 3*² | 1,333 | 10,199 to 11,531 |

*¹including 5′UTR: 1 to 40
*²including 3′UTR: 10,648 to 11,531

[0071] If the functional SELRC1 protein is not expressed due to mutation in the SELRC1 gene, the onset of CMT is expected to occur. Accordingly, one aspect of the present invention is a method for acquiring data for diagnosis of Charcot-Marie-Tooth disease comprising:

[0072] determining the nucleotide sequence of the SELRC1 gene in a sample; and

[0073] comparing the sequence with the nucleotide sequence represented by SEQ ID NO: 5 to determine the presence or absence of a mutation.

[0074] As described above, mutation in the SELRC1 gene includes a mutation on any exon or a mutation at a splicing site which inhibits expression of the functional SELRC1 protein, and is not limited to any specific mutations. Accordingly, although not limited to any mutations, examples of mutations found by the present inventors include a missense mutation on exon 2 in the SELRC1 gene (c.115C>T, p.R39W) (a mutation of cytosine to thymine at position 5508 of SEQ ID NO: 5, a mutation of an arginine residue to a tryptophan residue at position 39 of SEQ ID NO: 6) and a missense mutation on exon 1 in the SELRC1 gene (c.17A>G, p.D6G) (a mutation of adenine to guanine at position 57 of SEQ ID NO: 5, a mutation of an aspartic acid residue to a glycine residue at position 6 of SEQ ID NO: 6).

### <Diagnosis of CMT>

[0075] The present invention also provides a method for detection of a mutation in a CMT-causing gene and diagnosis of CMT. In the present specification, “detection” occasionally refers to “detection of a mutation” and “detection of a disease or the possibility of the onset of a disease”, and “diagnosis” occasionally encompasses not only “diagnosis” to determine whether a subject is presenting with “CMT” but also “diagnosis” to determine “the possibility of the onset of CMT”.

[0076] In one embodiment, the present invention provides a method for diagnosing CMT in a subject comprising:

[0077] detecting the presence of a mutation in MME gene, FAT3 gene, or SELRC1 gene in a biological sample; and

[0078] diagnosing CMT in the subject on the basis of the presence of a mutation.

[0079] In one aspect, the method comprises:

[0080] hybridizing a nucleic acid derived from MME gene, FAT3 gene, or SELRC1 gene in a biological sample with at least one oligonucleotide which specifically binds to a mutated MME gene, FAT3 gene, or SELRC1 gene and does not bind to the nonmutated MME gene, FAT3 gene, or SELRC1 gene; and detecting a signal generated through the hybridization.

[0081] Detection of a signal can be performed by using a conventional method in the art.

[0082] In another aspect, the method comprises:

[0083] amplifying a nucleic acid derived from MME gene, FAT3 gene, or SELRC1 gene in a biological sample by using at least one oligonucleotide which specifically binds to a mutated MME gene, FAT3 gene, or SELRC1 gene and does not bind to the nonmutated MME gene, FAT3 gene, or SELRC1 gene; and

[0084] detecting the amplified product.

Detection of an amplified product can be performed by using a conventional method in the art.

[0085] In another embodiment, the present invention also provides a method for identifying a subject having a high risk of the onset of CMT comprising the above steps.

[0086] The above “oligonucleotide” may comprise, but is not limited to, a primer and a probe, and a DNA chip to be described later which have a nucleotide sequence length within a range typically used in the art.

[0087] The above “mutation” in particular refers to mutation which does not allow for expression of a functional protein, and specific examples thereof include, but are not limited to, mutations described later. The “nonmutated” MME gene, FAT3 gene, and SELRC1 gene refer to genes having the sequence represented by SEQ ID NOs: 1, 3, and 5, respectively.

[0088] Examples of methods for detecting a mutation include: a method in which a primer having a length of 20 to 25 nucleotides is produced on the basis of the sequence of each of the above three genes (SEQ ID NOs: 1, 3, and 5), a nucleic acid in a sample is amplified by PCR method, and then the nucleotide sequence of the amplified nucleic acid is determined; a method in which a probe having a length of about 25 nucleotides and containing a possibly mutated nucleotide site is produced, and hybridization is performed for a DNA chip with the probe immobilized thereon; and PCR-SSCP method, and those skilled in the art could detect a mutation in a gene based on the description of the present specification. In the case that a partial nucleic acid is used to detect a mutation, the sequence to be selected is not limited and may be any partial sequence in the sequence represented by SEQ ID NO: 1, 3, or 5. Those skilled in the art could appropriately determine the sequence of an oligonucleotide which can be used for hybridization with and amplification of a nucleic acid having a specific mutation and synthesize an oligonucleotide suitable for detection of a mutation of interest. The present invention can provide such a primer, probe, and DNA chip.

[0089] In addition to the above-mentioned Sanger method and microarray method, which have been conventionally used in the art, a massive parallel nucleotide sequencing method by utilizing a next-generation sequencer (DNA analyzer) can be used for detection of mutations. Detection of mutations using the next-generation sequencer (NGS) includes Target Resequencing, exome analysis, and whole genome sequencing. Target Resequencing, an approach in which a specific sequence containing a targeted gene coding region is captured and concentrated using a special probe or primer and then subjected to sequence analysis, enables detection of a mutation targeting MME gene, FAT3 gene, SELRC1 gene, etc. Exome analysis and whole genome sequencing can determine almost all of the nucleotide sequence of a targeted gene, and thus enable easy detection of a mutation.

[0090] For example, in order to detect a mutation actually found in Examples below, in the case of MME gene, a primer or probe containing such a nucleotide site that a mutation of 654+1G>A, 661C>T, or 1861T>C (a mutation of guanine to adenine at position 37341 of SEQ ID NO: 1, a mutation of cytosine to thymine at position 39106 of SEQ ID NO: 1, or a mutation of thymine to cytosine at position 88926 of SEQ ID NO: 1) can be detected is suitably produced.

[0091] In the case of FAT3 gene, a primer or probe is suitably produced so as to detect a mutation of 6122C>A or 11327G>A (a mutation of cytosine to adenine at position 484856 of SEQ ID NO: 3 or a mutation of guanine to adenine at position 530415 of SEQ ID NO: 3).

[0092] In the case of SELRC1 gene, a primer or probe is suitably produced so as to detect a mutation of 115C>T or 17A>G (a mutation of cytosine to thymine at position 5508 of SEQ ID NO: 5 or a mutation of adenine to guanine at position 57 of SEQ ID NO: 5).

[0093] More specifically, a primer or probe having a nucleotide sequence containing, for example, each of the sequences represented by SEQ ID NOs: 17 to 20 is produced.

[0094] In the case of detection of a mutation in an mRNA, an in situ hybridization method can be used, for example.

[0095] In the case of detection of a mutation in a protein, an immunoassay method can be used, for example, in which the presence or absence of a mutation is determined with an antibody specific to a nonmutated protein, utilizing difference in binding affinity to the antibody.

[0096] For example, in order to detect a mutation actually found in Examples below, in the case of MME gene, an assay system is suitably designed so as to detect a mutation of Q221X or C621R (a mutation of a glutamine residue to a termination codon at position 221 of SEQ ID NO: 2 or a mutation of a cysteine residue to an arginine residue at position 621 of SEQ ID NO: 2).

[0097] In the case of FAT3 gene, an assay system is suitably designed so as to detect a mutation of P2041H or C3776Y (a mutation of a proline residue to a histidine residue at position 2041 of SEQ ID NO: 4 or a mutation of a cysteine residue to a tyrosine residue at position 3776 of SEQ ID NO: 4).

[0098] In the case of SELRC1 gene, an assay system is suitably designed so as to detect a mutation of R39W or D6G (a mutation of an arginine residue to a tryptophan residue at position 39 of SEQ ID NO: 6 or a mutation of an aspartic acid residue to a glycine residue at position 6 of SEQ ID NO: 6).

[0099] The present invention also provides a primer or probe for detection of autosomal recessive inherited CMT, being a nucleic acid consisting of a nucleotide sequence represented by any of SEQ ID NOs: 1, 3, and 5 or a partial nucleic acid thereof. The partial nucleic acid is a nucleic acid having a nucleotide sequence of 20 to 25 consecutive nucleotides. Use of the primer or probe according to the present invention enables determination of the presence or absence of a mutation in a DNA in a biological sample derived from a subject.

[0100] The present invention also provides a DNA chip for detection of autosomal recessive inherited CMT, comprising the above probe. The DNA chip can be produced by providing each probe singly or in combination with known genes on, for example, a GeneChip® CustomSeq® Resequencing Array manufactured by Affymetrix, although the production method is not limited thereto. Those skilled in the art could easily understand and conduct a procedure for detection of a mutation in a DNA with the above probe or DNA chip.

[0101] The present invention also provides a kit for detection of a mutation in MME gene, FAT3 gene, and/or SELRC1 gene in a biological sample to be used for the method according to the present invention. The kit according to the present invention comprises the above primer or probe or the above DNA chip, and a reagent, a buffer, etc., for hybridization with DNA derived from a subject.

### <Four Genes Having Homozygous Nonsense Mutation>

[0102] The present inventors further found four genes having a homozygous nonsense mutation as candidate genes for AR-CMT: ABCC3 (ATP-binding cassette, subfamily C (CFTR/MRP), member 3), ANKRD7 (ankyrin repeat domain 7), CNGA4 (cyclic nucleotide-gated channel α4), and COL6A6 (collagen, type VI, α6). The nucleotide sequence and amino acid sequence for ABCC3, ANKRD7, CNGA4, and COL6A6 are represented by SEQ ID NOs 7 and 8, SEQ ID NOs 9 and 10, SEQ ID NOs 11 and 12, and SEQ ID NOs 13 and 14, respectively. The positions of exons in these nucleotide sequences are listed in Tables 4 to 7.

TABLE 4
Information on exons in ABCC3 gene sequence

| Exon | Length (nucleotides) | Position in SEQ ID NO: 7 |
|---|---|---|
| 1*¹ | 125 | 1 to 125 |
| 2 | 177 | 20,976 to 21,152 |
| 3 | 126 | 21,846 to 21,971 |
| 4 | 138 | 22,190 to 22,327 |
| 5 | 126 | 23,226 to 23,351 |
| 6 | 62 | 23,579 to 23,640 |
| 7 | 132 | 24,381 to 24,512 |
| 8 | 192 | 26,067 to 26,258 |
| 9 | 178 | 28,825 to 29,002 |
| 10 | 162 | 29,094 to 29,255 |
| 11 | 93 | 30,297 to 30,389 |
| 12 | 204 | 32,698 to 32,901 |
| 13 | 147 | 33,007 to 33,153 |
| 14 | 88 | 33,574 to 33,661 |
| 15 | 67 | 33,997 to 34,063 |
| 16 | 127 | 34,284 to 34,410 |
| 17 | 177 | 34,496 to 34,672 |
| 18 | 168 | 38,115 to 38,282 |
| 19 | 190 | 38,613 to 38,802 |
| 20 | 115 | 40,506 to 40,620 |
| 21 | 145 | 40,775 to 40,919 |
| 22 | 208 | 41,027 to 41,234 |
| 23 | 311 | 41,422 to 41,732 |
| 24 | 200 | 42,888 to 43,087 |
| 25 | 127 | 43,237 to 43,363 |
| 26 | 102 | 44,942 to 45,043 |
| 27 | 147 | 48,754 to 48,900 |
| 28 | 159 | 49,093 to 49,251 |
| 29 | 167 | 49,853 to 50,019 |
| 30 | 195 | 52,680 to 52,874 |
| 31*² | 1161 | 56,236 to 57,396 |

*¹including 5′UTR: 1 to 80
*²including 3′UTR: 56,345 to 57,396

TABLE 5
Information on exons in ANKRD7 gene sequence

| Exon | Length (nucleotides) | Position in SEQ ID NO: 9 |
|---|---|---|
| 1*¹ | 334 | 238 to 571 |
| 2 | 115 | 9,993 to 10,107 |
| 3 | 174 | 10,263 to 10,436 |
| 4 | 107 | 11,603 to 11,709 |
| 5 | 137 | 12,352 to 12,488 |
| 6*² | 90 | 15,471 to 15,560 |
| 7*² | 341 | 17,911 to 18,251 |

*¹including 5′UTR: 238 to 392
*²including 3′UTR: 15,525 to 18,251

TABLE 6
Information on exons in CNGA4 gene sequence

| Exon | Length (nucleotides) | Position in SEQ ID NO: 11 |
|---|---|---|
| 1*¹ | 177 | 3,599 to 3,775 |
| 2 | 102 | 3,891 to 3,992 |
| 3 | 107 | 4,191 to 4,297 |
| 4 | 646 | 4,573 to 5,218 |
| 5 | 350 | 5,938 to 6,287 |
| 6*² | 481 | 8,456 to 8,936 |

*¹including 5′UTR: 3,599 to 3,713
*²including 3′UTR: 8,917 to 8,936

TABLE 7
Information on exons in COL6A6 gene sequence

| Exon | Length (nucleotides) | Position in SEQ ID NO: 13 |
|---|---|---|
| 1*¹ | 95 | 1 to 95 |
| 2 | 597 | 2,735 to 3,331 |
| 3 | 621 | 4,661 to 5,281 |
| 4 | 561 | 6,369 to 6,929 |
| 5 | 558 | 7,714 to 8,271 |
| 6 | 576 | 10,485 to 11,060 |
| 7 | 570 | 13,623 to 14,192 |
| 8 | 344 | 21,228 to 21,571 |
| 9 | 79 | 21,657 to 21,735 |
| 10 | 155 | 26,173 to 26,327 |
| 11 | 93 | 28,757 to 28,849 |
| 12 | 54 | 30,708 to 30,761 |
| 13 | 72 | 32,208 to 32,279 |
| 14 | 27 | 32,363 to 32,389 |
| 15 | 45 | 32,728 to 32,772 |
| 16 | 54 | 32,866 to 32,919 |
| 17 | 63 | 33,948 to 34,010 |
| 18 | 66 | 38,032 to 38,097 |
| 19 | 54 | 39,424 to 39,477 |
| 20 | 36 | 46,598 to 46,633 |
| 21 | 63 | 48,569 to 48,631 |
| 22 | 63 | 50,316 to 50,378 |
| 23 | 63 | 61,488 to 61,550 |
| 24 | 63 | 66,152 to 66,214 |
| 25 | 51 | 66,986 to 67,036 |
| 26 | 36 | 74,257 to 74,292 |
| 27 | 63 | 75,366 to 75,428 |
| 28 | 63 | 81,319 to 81,381 |
| 29 | 36 | 82,499 to 82,534 |
| 30 | 37 | 82,654 to 82,690 |
| 31 | 12 | 84,658 to 84,669 |
| 32 | 494 | 88,736 to 89,229 |
| 33 | 97 | 98,343 to 98,439 |
| 34 | 672 | 101,304 to 101,975 |
| 35 | 94 | 104,670 to 104,763 |
| 36*¹ | 2,954 | 114,869 to 117,822 |

*¹including 5′UTR: 1 to 31
*²including 3′UTR: 115,065 to 117,822

[0103] The protein encoded by ABCC3 gene, which is located on chromosome 17, belongs to the ABC (ATP-binding cassette) transporter superfamily, and is involved in efflux transport from the inside of a cell in collaboration with ATP hydrolysis. In particular, the protein is known to play an important role for transport and excretion of glucuronic acid conjugates, organic anionic compounds, and bile acid in liver and intestinal tract.

[0104] According to a recent report on a genome-wide association study (GWAS) for a habitual alcohol drinker group, ANKRD7 gene located on chromosome 7 is a gene associated with the risk of alcoholism. However, the function has not been clarified.

[0105] CNGA4 gene located on chromosome 11 is known to encode a regulatory subunit for a cyclic nucleotide-gated channel and have an important role for olfactory signaling and adaptation in olfactory neurons.

[0106] COL6A6 gene located on chromosome 3 is a gene encoding α6 chain of type VI collagen, an extracellular matrix protein. Mutations in COL6A1, COL6A2, and COL6A3 are known to cause Ullrich congenital muscular dystrophy (OMIM #254090) and Bethlem myopathy (OMIM#158810). However, influence of COL6A6 mutation on human phenotype has not been reported. The type VI collagen has been reported to have a neuroprotective action to prevent the aggregation of amyloid β proteins, which causes Alzheimer's disease.

[0107] A mutation found in ABCC3 gene is a homozygous nonsense mutation on exon 30 (48764928 C>T R1438X) (a mutation of cytosine to thymine at position 52711 of SEQ ID NO: 7, a mutation of an arginine residue to a termination codon at position 1438 of SEQ ID NO: 8).

[0108] A mutation found in ANKRD7 gene is a homozygous nonsense mutation (117874773 G>T E105X) (a mutation of guanine to thymine at position 10281 of SEQ ID NO: 9, a mutation of a glutamic acid residue to a termination codon at position 105 of SEQ ID NO: 10).

[0109] A mutation found in CNGA4 gene is a homozygous nonsense mutation (6261928 C>T R302X) (a mutation of cytosine to thymine at position 5205 of SEQ ID NO: 11, a mutation of an arginine residue to a termination codon at position 302 of SEQ ID NO: 12).

[0110] A mutation found in COL6A6 gene is a homozygous nonsense mutation (130282181 C>T Q112X) (a mutation of cytosine to thymine at position 3004 of SEQ ID NO: 13, a mutation of a glutamine residue to a termination codon at position 112 of SEQ ID NO: 14).

[0111] Accordingly, detection of a mutation in ABCC3 gene, ANKRD7 gene, CNGA4 gene, and/or COL6A6 gene enables acquisition of data for diagnosis of AR-CMT.

[0112] Detection of a mutation is not limited, and detection of a mutation in ABCC3 gene involves, for example, detection of a mutation in a gene on chromosome 17 such as 48764928 C>T R1438X.

[0113] Detection of a mutation in ANKRD7 gene involves detection of a mutation in a gene on chromosome 7 such as 117874773 G>T E105X.

[0114] Detection of a mutation in CNGA4 gene involves detection of a mutation in a gene on chromosome 11 such as 6261928 C>T R302X.

[0115] Detection of a mutation in COL6A6 gene involves detection of a mutation in a gene on chromosome 3 such as 130282181 C>T Q112X.

[0116] The present invention also provides a method for diagnosing AR-CMT in a subject comprising:

[0117] detecting the presence of a mutation in ABCC3 gene, ANKRD7 gene, CNGA4 gene, and/or COL6A6 gene in a biological sample; and

[0118] diagnosing AR-CMT in the subject on the basis of the presence of a mutation.

[0119] In one aspect, the method comprises:

[0120] hybridizing a nucleic acid derived from ABCC3 gene, ANKRD7 gene, CNGA4 gene, or COL6A6 gene in a biological sample with at least one oligonucleotide which specifically binds to a mutated ABCC3 gene, ANKRD7 gene, CNGA4 gene, or COL6A6 gene and does not bind to the nonmutated ABCC3 gene, ANKRD7 gene, CNGA4 gene, or COL6A6 gene; and

[0121] detecting a signal generated through the hybridization.

[0122] In another aspect, the method comprises:

[0123] amplifying a nucleic acid derived from ABCC3 gene, ANKRD7 gene, CNGA4 gene, or COL6A6 gene in a biological sample by using at least one oligonucleotide which specifically binds to a mutated ABCC3 gene, ANKRD7 gene, CNGA4 gene, or COL6A6 gene and does not bind to the nonmutated ABCC3 gene, ANKRD7 gene, CNGA4 gene, or COL6A6 gene; and

[0124] detecting the amplified product.

[0125] In another embodiment, the present invention also provides a method for identifying a subject having a high risk of the onset of AR-CMT comprising the above steps.

[0126] The above “mutation” in particular refers to mutation which does not allow for expression of a functional protein, and specific examples thereof include, but are not limited to, the mutations described above. The “nonmutated” ABCC3 gene, ANKRD7 gene, CNGA4 gene, and COL6A6 gene refer to genes having a sequence represented by SEQ ID NOs: 7, 9, 11, and 13, respectively.

[0127] In addition, the present invention can provide: a primer or probe having a nucleic acid consisting of a nucleotide sequence of any of the above four genes represented by SEQ ID NOs: 7, 9, 11, and 13, or a partial nucleic acid thereof; a DNA chip comprising it; and a kit comprising at least one of them. Those skilled in the art could appropriately determine the sequence of an oligonucleotide which can be used for hybridization with and amplification of a nucleic acid having a specific mutation and synthesize an oligonucleotide suitable for detection of a mutation of interest. The present invention can provide such a primer, probe, and DNA chip.

### <Mutation in CAD Gene>

[0128] The present inventors have further found cases in each of which the translated region of CAD (carbamoyl-phosphate synthetase 2, aspartate transcarbamylase, and dihydroorotase) gene has two heterozygous missense mutations. A protein encoded by CAD is a multienzyme complex having the first three enzymatic functions in the de novo biosynthesis pathway of pyrimidine nucleotide (C: carbamoyl-phosphate synthetase (CPS II), A: aspartate carbamoyltransferase, D: dihydroorotase). Although the function of CAD in the peripheral nervous system is unclear, CAD is known to be present in the cytoplasm and closely associated with cellular proliferative potential, and to have high activity in normal cells with active division and proliferation in thymus, testis, spleen, etc., and in various tumor cells.

[0129] The nucleotide sequence of the gene encoding the functional CAD protein and the amino acid sequence of the CAD protein are represented by SEQ ID NOs: 15 and 16, respectively. The positions of exons in the CAD gene sequence represented by SEQ ID NO: 15 are listed in the following Table 8.

TABLE 8
Information on exons in CAD gene sequence

| Exon | Length (nucleotides) | Position in SEQ ID NO: 15 |
|---|---|---|
| 1*¹ | 244 | 1 to 244 |
| 2 | 140 | 488 to 627 |
| 3 | 130 | 3,829 to 3,958 |
| 4 | 143 | 4,805 to 4,947 |
| 5 | 142 | 5,130 to 5,271 |
| 6 | 172 | 5,477 to 5,648 |
| 7 | 186 | 6,174 to 6,359 |
| 8 | 113 | 6,528 to 6,640 |
| 9 | 146 | 6,956 to 7,101 |
| 10 | 132 | 7,356 to 7,487 |
| 11 | 234 | 7,621 to 7,854 |
| 12 | 222 | 8,316 to 8,537 |
| 13 | 189 | 8,742 to 8,930 |
| 14 | 125 | 9,136 to 9,260 |
| 15 | 131 | 9,443 to 9,573 |
| 16 | 113 | 14,079 to 14,191 |
| 17 | 245 | 14,591 to 14,835 |
| 18 | 247 | 15,059 to 15,305 |
| 19 | 99 | 15,653 to 15,751 |
| 20 | 225 | 15,923 to 16,147 |
| 21 | 183 | 16,237 to 16,419 |
| 22 | 219 | 16,619 to 16,837 |
| 23 | 168 | 17,129 to 17,296 |
| 24 | 183 | 17,856 to 18,038 |
| 25 | 105 | 18,147 to 18,251 |
| 26 | 240 | 18,895 to 19,134 |
| 27 | 82 | 19,360 to 19,441 |
| 28 | 167 | 19,990 to 20,156 |
| 29 | 165 | 20,329 to 20,493 |
| 30 | 132 | 20,667 to 20,798 |
| 31 | 202 | 21,042 to 21,243 |
| 32 | 191 | 21,653 to 21,843 |
| 33 | 141 | 21,942 to 22,082 |
| 34 | 102 | 22,308 to 22,409 |
| 35 | 97 | 22,876 to 22,972 |
| 36 | 45 | 23,522 to 23,566 |
| 37 | 170 | 23,669 to 23,838 |
| 38 | 75 | 23,933 to 24,007 |
| 39 | 213 | 24,522 to 24,734 |
| 40 | 126 | 24,913 to 25,038 |
| 41 | 156 | 25,231 to 25,386 |
| 42 | 102 | 25,483 to 25,584 |
| 43 | 95 | 25,809 to 25,903 |
| 44*² | 528 | 26,027 to 26,554 |

*¹including 5′UTR: 1 to 162
*²including 3′UTR: 26,130 to 26,554

[0130] As described above, mutation in CAD gene includes a mutation on any exon or a mutation at a splicing site which inhibits expression of the functional CAD protein, and is not limited to any specific mutations. Accordingly, although not limited to any mutations, examples of mutations in CAD gene found by the present inventors include heterozygous mutations of c.497C>T, p.T166I (a mutation of cytosine to thymine at position 5131 of SEQ ID NO: 15, a mutation of a threonine residue to an isoleucine residue at position 166 of SEQ ID NO: 16) and c.503G>A, p.R168Q (a mutation of guanine to adenine at position 5137 of SEQ ID NO: 15, a mutation of an arginine residue to a glutamine residue at position 168 of SEQ ID NO: 16) and heterozygous mutations of c.2501G>A, p.R834H (a mutation of guanine to adenine at position 14691 of SEQ ID NO: 15, a mutation of an arginine residue to a histidine residue at position 834 of SEQ ID NO: 16) and c.4958T>G, p.L1653R (a mutation of thymine to guanine at position 21139 of SEQ ID NO: 15, a mutation of a leucine residue to an arginine residue at position 1653 of SEQ ID NO: 16).

[0131] Accordingly, detection of a mutation in CAD gene enables acquisition of data for diagnosis of CMT. Detection of a mutation is not limited, and involves, for example, detection of one or more mutations of the above c.497C>T, p.T166I, c.503G>A, p.R168Q, c.2501G>A, p.R834H, and c.4958T>G, p.L1653R.

[0132] The present invention also provides a method for diagnosing CMT in a subject comprising:

[0133] detecting the presence of a mutation in CAD gene in a biological sample; and

[0134] diagnosing CMT in the subject on the basis of the presence of a mutation.

[0135] In one aspect, the method comprises:

[0136] hybridizing a nucleic acid derived from CAD gene in a biological sample with at least one oligonucleotide which specifically binds to a mutated CAD gene and does not bind to the nonmutated CAD gene; and

[0137] detecting a signal generated through the hybridization.

[0138] In another aspect, the method comprises:

[0139] amplifying a nucleic acid derived from CAD gene in a biological sample by using at least one oligonucleotide which specifically binds to a mutated CAD gene and does not bind to the nonmutated CAD gene; and

[0140] detecting the amplified product.

[0141] In another embodiment, the present invention also provides a method for identifying a subject having a high risk of the onset of CMT comprising the above steps.

[0142] The above “mutation” in particular refers to mutation which does not allow for expression of a functional protein, and specific examples thereof include, but are not limited to, the mutations described above. The “nonmutated” CAD gene refers to a gene having a sequence represented by SEQ ID NO: 15.

[0143] In addition, the present invention can provide: a primer or probe having a nucleic acid consisting of a nucleotide sequence of the CAD gene represented by SEQ ID NO: 15, or a partial nucleic acid thereof; a DNA chip comprising it; and a kit comprising at least one of them. Those skilled in the art could appropriately determine the sequence of an oligonucleotide which can be used for hybridization with and amplification of a nucleic acid having a specific mutation and synthesize an oligonucleotide suitable for detection of a mutation of interest. The present invention can provide such a primer, probe, and DNA chip.

[0144] Moreover, the present invention can provide a method for gene therapy to introduce MME (membrane metallo-endopeptidase) gene, FAT3 (FAT tumor suppressor homolog 3) gene, and/or SELRC1 (Sell repeat containing 1) gene into a CMT patient who has been found to have a mutation in these genes by using the method according to the present invention, or for treatment, for example, to alleviate the symptoms of CMT in a CMT patient by administration of a protein encoded by these genes.

[0145] From the result that five unrelated families shared a mutation in MME gene and were presenting with an identical phenotype, the present inventors have found that the gene mutation causes CMT. The types of MME mutations include homozygous nonsense mutation in one case and splicing site mutation in three cases, and thus functional loss of the gene is considered to be highly associated with the pathological mechanism. Also for FAT3 gene and SELRC1 gene which cause the symptoms of CMT due to homozygous missense mutation and ABCC3 gene, ANKRD7 gene, CNGA4 gene, and COL6A6 gene which are expected to cause the symptoms of CMT due to homozygous nonsense mutation, their functional loss may be associated with the pathology condition. If a homozygous or compound heterozygous mutation is present in any of these genes, the function of the corresponding gene is lost and thus the onset is expected to occur at an extremely high probability, even in the case of an individual presenting with no symptoms.

[0146] Segregation analysis for one family having an MME gene mutation, two families having a FAT3 gene mutation, and two families having an SELRC1 gene mutation demonstrated that the gene mutations were segregated with the disease in each family, in other words, only affected individuals in the family had a homozygous mutation at the relevant site and healthy individuals in the family had no mutation at the relevant site or had a heterozygous mutation at the relevant site (FIGS. 5 to 8).

[0147] Due to the diversity of the disease, all of the above gene mutations are not always found in all patients. However, CMT is an extremely diverse disease genetically and a large number of causal genes therefor are presumably left unknown. As more and more causal genes are discovered, the accuracy of genetic diagnosis is expected to be further improved.

[0148] Further, the present inventors have identified many novel potential causal genes and candidate genes for CMT from numerous mutation data in exome analysis for CMT cases using the “disease candidate gene narrowing-down system”. This approach is applicable to identification of cause for a lot of other Mendelian genetic diseases with unidentified cause, and will enable identification of causal genes for more and more diseases further in the future. In addition, identification of novel causal genes for CMT promotes understanding of the molecular pathological mechanism, and is expected to ultimately lead to development of an effective treatment method and understanding of related diseases.

[0149] Several approaches have been previously used for discovery of a novel causal gene through exome analysis. The most common approach is one in which, for a family for which causal loci have been narrowed down to a certain level on the basis of the linkage analysis information, a mutation present in the candidate region is found out using exome analysis. In this approach, however, only one causal gene can be found out in most cases, and it is difficult to identify the cause even when exome analysis is performed, if causal loci have not been narrowed down sufficiently in linkage analysis. Linkage analysis requires gene analysis for as many constituent members in a family as possible, including not only a proband but also individuals presenting with symptoms in the family and healthy individuals in the family. In particular, decrease in the number of children and increase in the number of nuclear families are progressing in recent years, and presumably mainly because of this phenomenon, the numbers of families having a small number of family members, families whose family members do not participate in a genetic test, and families with a sporadic case are increasing. As a result, linkage analysis cannot narrow down candidate regions sufficiently, and due to such a situation there still exist many families for which even exome analysis cannot identify the cause.

[0150] The present invention is characterized in that only a proband has to be subjected to exome analysis and a plurality of causal genes can be detected or found out simultaneously. However, the number of specimens for exome analysis is still important, and more causal genes are presumably extracted at a higher probability as the number of specimens increases.

### Examples

[0151] Hereinafter, the present invention will be described more specifically with reference to Examples, but it is not intended to limit the present invention to the Examples.

### <Patients of Interest and Collection of Clinical Information>

[0152] DNAs were collected for 544 cases in total between April 2007 and April 2012, which consisted of cases clinically diagnosed as CMT (including CMT-related diseases) and cases suspected of CMT. Among cases of demyelinating CMT, only cases for which the absence of duplication or deletion in PMP22 gene had been confirmed in advance by using a fluorescence in situ hybridization (FISH) method were collected. Clinical information about patients was acquired by neurologists or pediatricians via medical examinations and tests. The information acquired included clinical course, neurological findings and laboratory findings including blood test, nerve conduction test, and neuroimaging test.

<Screening for Non-Autosomal Dominant Inherited CMT Cases with Unidentified Cause>

[0153] From the 544 cases, 179 cases with no known genetic etiology and a family history of autosomal dominant inheritance were selected according to the following four exclusion criteria (FIG. 1).

(1) Mutation screening with a microarray DNA chip for diagnosis was conducted for all of the 544 cases to exclude 68 cases with pathological mutation in known CMT-causing genes (Table 9) (N=476). (Cases caused by genes being not of interest were excluded.)
(2) From the 476 cases, 172 cases in total including cases with poor clinical information, cases highly suspected of CIDP, and cases with mild neuropathy and main symptoms of other neurological signs (spasticity, rigidity, upper motor neuron sign, etc.) were excluded, and exome analysis was performed for 304 cases. (Cases with the possibility of other diseases were excluded.)
(3) Mutation screening by exome analysis was conducted to exclude 83 cases with known or suspected pathogenic mutation in known causal genes for hereditary neuromuscular diseases which need to be distinguished from CMT and CMT-related diseases such as HMN, HSAN, SMA, and other CMTs (N=221). (Cases caused by genes being not of interest were excluded.)
(4) On the basis of clinical information, 41 cases with a family history of autosomal dominant inherited disease were excluded (N=179).

TABLE 9
The List of screening genes by Microarray resequencing DNA chip

| | Gene | | Phenotype |
|---|---|---|---|
| | symbol | | MIM |
| Classification | (Gene ID) | Phenotype | number |
| CMT | AARS | Charcot-Marie-Tooth disease, axonal, type 2N | 613287 |
| | (16) | | |
| CMT | DHH | 46XY partial gonadal dysgenesis, with minifascicular neuropathy | 607080 |
| | (50846) | | |
| CMT | EGR2 | Charcot-Marie-Tooth disease, type 1D | 607678 |
| | (1959) | | |
| CMT | GAN | Giant axonal neuropathy-1 | 256850 |
| | (8139) | | |
| CMT | GARS | Charcot-Marie-Tooth disease, type 2D | 601472 |
| | (2617) | Neuropathy, distal hereditary motor, type V | 600794 |
| CMT | GDAP1 | Charcot-Marie-Tooth disease, axonal, type 2K | 607831 |
| | (54332) | Charcot-Marie-Tooth disease, axonal, with vocal cord paresis | 607706 |
| | | Charcot-Marie-Tooth disease, recessive intermediate, A | 608340 |
| | | Charcot-Marie-Tooth disease, type 4A | 214400 |
| CMT | GJB1 | Charcot-Marie-Tooth neuropathy, X-linked dominant, 1 | 302800 |
| | (2705) | | |
| CMT | HSPB1 | Charcot-Marie-Tooth disease, axonal, type 2F | 606595 |
| | (3315) | Neuropathy, distal hereditary motor, type IIB | 608634 |
| CMT | HSPB8 | Charcot-Marie-Tooth disease, axonal, type 2L | 608673 |
| | (26353) | Neuropathy, distal hereditary motor, type IIA | 158590 |
| CMT | KARS | Charcot-Marie-Tooth disease, recessive intermediate, B | 613641 |
| | (3735) | | |
| CMT | LITAF | Charcot-Marie-Tooth disease, type 1C | 601098 |
| | (9516) | | |
| CMT | LMNA | Charcot-Marie-Tooth disease, type 2B1 | 605588 |
| | (4000) | | |
| CMT | MFN2 | Charcot-Marie-Tooth disease, type 2A2 | 609260 |
| | (9927) | Hereditary motor and sensory neuropathy VI | 601152 |
| CMT | MPZ | Charcot-Marie-Tooth disease, dominant intermediate D | 607791 |
| | (4359) | Charcot-Marie-Tooth disease, type 1B | 118200 |
| | | Charcot-Marie-Tooth disease, type 2I | 607677 |
| | | Charcot-Marie-Tooth disease, type 2J | 607736 |
| | | Dejerine-Sottas disease | 145900 |
| | | Neuropathy, congenital hypomyelinating | 605253 |
| CMT | MTMR2 | Charcot-Marie-Tooth disease, type 4B1 | 601382 |
| | (8898) | | |
| CMT | NDRG1 | Charcot-Marie-Tooth disease, type 4D | 601455 |
| | (10397) | | |
| CMT | NEFL | Charcot-Marie-Tooth disease, type 1F | 607734 |
| | (4747) | Charcot-Marie-Tooth disease, type 2E | 607684 |
| CMT | PMP22 | Charcot-Marie-Tooth disease, type 1A | 118220 |
| | (5376) | Charcot-Marie-Tooth disease, type 1E | 118300 |
| | | Dejerine-Sottas disease | 145900 |
| | | Neuropathy, recurrent, with pressure palsies | 162500 |
| CMT | PRX | Charcot-Marie-Tooth disease, type 4F | 614895 |
| | (57716) | Dejerine-Sottas disease, autosomal recessive | 145900 |
| CMT | RAB7A | Charcot-Marie-Tooth disease, type 2B | 600882 |
| | (7879) | | |
| CMT | SBF2 | Charcot-Marie-Tooth disease, type 4B2 | 604563 |
| | (81846) | | |
| CMT | SH3TC2 | Charcot-Marie-Tooth disease, type 4C | 601596 |
| | (79628) | | |
| CMT | YARS | Charcot-Marie-Tooth disease, dominant intermediate C | 608323 |
| | (8565) | | |
| CMT, distal | DNM2 | Charcot-Marie-Tooth disease, axonal, type 2M | 606482 |
| myopathies | (1785) | Charcot-Marie-Tooth disease, dominant intermediate B | 606482 |
| Other hereditary | SLC12A6 | Agenesis of the corpus callosum with peripheral neuropathy | 218000 |
| neuropathies | (9990) | | |
| Other inherited disorders | APTX | Ataxia, early-onset, with oculomotor apraxia and | 208920 |
| affecting the peripheral | (54840) | hypoalbuminemia | |
| nervous system | | | |
| Other inherited disorders | TDP1 | Spinocerebellar ataxia, autosomal recessive, | 607250 |
| affecting the peripheral | (55775) | with axonal neuropathy | |
| nervous system | | | |
| ALS, HMN | SETX | Amyotrophic lateral sclerosis 4, juvenile | 602433 |
| | (23064) | Ataxia- ocular apraxia-2 | 606002 |

### <Microarray DNA Chip for Diagnosis>

[0154] A DNA chip for diagnosis (GeneChip® CustomSeq® Resequencing Array manufactured by Affymetrix) provided with 28 known causal genes for CMT and CMT-related diseases (Table 9) was uniquely designed and mutation analysis was performed.

[0155] Examples of databases providing the gene sequences include RefSeq (Reference Sequence database) available from NCBI (National Center for Biotechnology Information; http://www.ncbi.nlm.nih.gov/gene) and hg19 (GRCh37 or GRCh38) available from UCSC genome database.

[0156] “Gene ID” in Table 9 indicates the ID of each gene in the database from NCBI. Gene sequence information in the database can be obtained as follows.

Access to NCBI (http://www.ncbi.nlm.nih.gov/gene)→Input Gene symbol (or Gene ID) in the search box and search→Click “FASTA” in “Genomic” in the item “NCBI Reference Sequences (RefSeq)”→The whole sequence will be displayed.

[0157] For each case, 120 ng of DNA was used. A primer set targeting the whole translated regions and slicing sites of genes provided was produced, and the genome DNA was amplified using multiplex PCR, and pooling, fragmentation, and labeling were performed in accordance with the protocol (Affymetrix CustomSeq Resequencing protocol instructions). The chip was subjected to hybridization (49° C., 60 RPM, 16 hours) followed by washing, and thereafter stained with biotin and scanned. The microarray data were analyzed with GeneChip sequence Analysis Software version 4.0 (Affymetrix).

### <Exome Analysis>

[0158] Genome DNA was extracted from the peripheral blood of each patient by using Gentra Puregene Blood Kit (QIAGEN, Tokyo, Japan).

[0159] By using a SureSelect v4+UTR kit, an exon concentration kit manufactured by Illumina, Inc., 3 μg of genome DNA was subjected to exon capture followed by exome analysis with a Hiseq2000 (Illumina, Inc., San Diego, Calif.). After acquisition of sequence data, the raw read sequence was aligned with a human reference sequence (National Center for Biotechnology Information reference genome build 37/UCSC human genome 19) by using Burrows-Wheeler Alingner (BWA) (see Li, H. & Durbin, R. Fast and accurate short read alignment with Burrows-Wheeler transform. Bioinformatics 25, 1754-60 (2009)), and mutation calling was performed by using SAMtools (see Li, H. et al. The Sequence Alignment/Map format and SAMtools. Bioinformatics 25, 2078-9 (2009)). Annotation was performed with an in-house script.

### <Disease Candidate Gene Narrowing-Down System>

[0160] To efficiently identify candidates of causal mutations or causal genes for monogenic diseases from numerous mutations obtained in exome analysis, we developed a “disease candidate gene narrowing-down system”. This system is composed of a “filtering system” and “shared variants pickup system”. The “filtering system” can filter mutations called in the exome analysis for each case on the basis of the class of mutation (SNV (single nucleotide variant) or INDEL (minute insertion/deletion)), mutation type (synonymous mutation, non-synonymous mutation, nonsense mutation, frameshift mutation, splicing site mutation, intron mutation, 5′/3′-UTR mutation), genotype (heterozygous or homozygous), quality, read depth, MAF (minor allele frequency), registration status in public databases, etc. The “shared variants pickup system” is a system to efficiently extract mutations or mutated genes shared by a plurality of affected individuals.

### <Mutation Filtering and Overlap Strategy>

[0161] From the exome analysis for the above-described 179 cases of non-autosomal dominant inherited (Non-AD) CMT with unidentified cause, a massive mutation list was obtained. For the purpose of identifying novel causal genes for autosomal recessive inherited CMT, we filtered the mutation list using the “disease candidate gene narrowing-down system” under the following eight conditions (FIG. 2).

(1) Class of mutation: SNV
(2) Mutation type: non-synonymous mutation (non-synonymous SNV), frameshift/in-flame mutation (frameshift/in-frame InDel), splicing site mutation
(3) Genotype: homozygous mutation or compound heterozygous mutation
(4) Quality: Phred scaled base quality >20 and Phred scaled mapping quality >20
(5) Coverage (Read depth)>10×
(6) MAF (minor allele frequency) according to 1000 Genomes Project36<1%
(7) A novel mutation not registered in 1000 genomes database (http://brower.1000genomes.org) or dbSNP database build 137 (http://www.ncbi.nlm.nih.gov/snp/)
(8) Chromosome: autosome (chrom 1 to 22)

[0162] After filtering, mutations or mutated genes shared by two or more cases were extracted and listed using the “shared variants pickup system”.

<Comparison with Japanese Control Database>

[0163] Mutations not registered in 1000 Genomes (http://www.1000genomes.org/) or dbSNP (build 137) (http://www.ncbi.nlm.nih.gov/projects/SNP/) may include many mutations specific to Japanese. Thus, we referred to the WEB site Human Genetic Variation Browser (http://www.genome.med.kyoto-u.ac.jp/SnpDB/), which accumulates mutation data in exome analysis for approximately 1,000 Japanese control specimens and discloses the data partially, and compared and checked the information on mutation frequency extracted by the “disease candidate gene narrowing-down system”.

### <Mutation Confirmation Using Direct Sequencing Method>

[0164] All of the mutations in known causal genes detected by the microarray DNA chip and exome analysis were reconfirmed using Sanger method. In addition, the mutations extracted by using the “disease candidate gene narrowing-down system” were reconfirmed using Sanger method, and segregation analysis was performed as thorough as possible.

### <Extraction of Novel Candidate Genes>

[0165] The mutation data in exome analysis for the 179 cases of non-autosomal dominant inherited (Non-AD) CMT with unidentified cause, for which pathological mutation was not found in known causal genes for CMT (and CMT-related diseases), were filtered using the “disease candidate gene narrowing-down system”, and then 19 genes (41 mutations) each sharing a homozygous mutation or a compound heterozygous mutation among two or more cases were found out.

[0166] From the 41 mutations, mutations registered in the Japanese control database were excluded, and four novel potential causal genes for CMT, i.e., MME (membrane metallo-endopeptidase) gene, FAT3 (FAT atypical cadherin 3) gene, SELRC1 (Sell repeat containing 1) gene, CAD (carbamoyl-phosphate synthetase 2, aspartate transcarbamylase, and dihydroorotase) gene, were newly found out (Table 10). Clinical features of cases with these gene mutations are summarized in Tables 11 to 14.

TABLE 10
Mutation sites and Prediction scores for novel causal genes

| | | | Amino | | | | | | |
|---|---|---|---|---|---|---|---|---|---|
| Gene | Number of | Chromo- | acid | | | | 1000 | | Japanese |
| symbol | patients | some | mutation | Variation | Polyphen2 | SIFT | genomes | dbSNP | control |
| MME | 3 | chr3 | — | Splice | n.a | n.a | — | — | 0 |
| | 1 | chr3 | C621R | Missense | 1.0 (D) | 0.0 (D) | — | — | 0 |
| | 1 | chr3 | Q221X | Nonsense | 0.735 (P) | 0.0 (D) | — | — | 0 |
| FAT3 | 1 | chr11 | P2041H | Missense | 0.978 (D) | 0.89 (T) | — | — | 0 |
| | 1 | chr11 | C3776Y | Missense | 0.170 (B) | 0.82 (T) | — | — | 0 |
| SELRC1 | 1 | chr1 | R39W | Missense | 0.998 (D) | 0.01 (D) | — | — | 0 |
| | 1 | chr1 | D6G | Missense | 0.777 (P) | 0.04 (D) | — | — | 0 |
| CAD | 1 | chr2 | T166I | Missense | 0.006 (B) | 0.05 (T) | — | — | 0 |
| | 1 | chr2 | R168Q | Missense | 0.001 (B) | 0.41 (T) | — | — | 0 |
| | 1 | chr2 | R834H | Missense | 0.001 (B) | 0.09 (T) | — | — | 0 |
| | 1 | chr2 | L1653R | Missense | 0.467 (P) | 0.16 (T) | — | — | 0 |

SIFT score: Amino acid mutation with probabilities <0.05 are predicted to be deleterious.

[0167] A homozygous mutation in each of the three genes, i.e., MME gene, FAT3 gene, and SELRC1 gene, was shared by two or more families and there existed five cases with MME mutation, one case with homozygous nonsense mutation, one case with homozygous missense mutation, and three cases with homozygous splicing site mutation. There existed two cases with mutation in FAT3 gene and two cases with mutation in SELRC1 gene, and the mutations were all homozygous missense mutations.

[0168] Polyphen2 and SIFT in the table are each a prediction tool capable of determining whether a mutation is a pathogenic mutation, and Polyphen2 scores a mutation as 0.000 (maximum probability of benignity) to 0.999 (maximum probability of damaging). SIFT predicts a mutation with less than 0.05 to be deleterious.

### <Five Families Having MME Mutation>

[0169] In the cases obtained here, the mutations in MME gene were a mutation on a splice donor site between exons 7 and 8 (c.654+1G>A) (a mutation of guanine to adenine at position 37341 of SEQ ID NO: 1) for three cases of patient ID: 4229, patient ID: 4309, and patient ID: 3676; a nonsense mutation on exon 8 (c.661C>T, p.Q221X) (a mutation of cytosine to thymine at position 39106 of SEQ ID NO: 1, a mutation of a glutamine residue to a termination codon at position 221 of SEQ ID NO: 2) for patient ID: 4590; and a missense mutation on exon 19 (c.1861T>C, p.C621R) (a mutation of thymine to cytosine at position 88926 of SEQ ID NO: 1, a mutation of a cysteine residue to an arginine residue at position 621 of SEQ ID NO: 2) for patient ID: 4185 (Table 11). The family histories of the five families having MME gene mutation are illustrated in FIG. 3, and a schematic of neprilysin encoded by MME gene and the mutation sites are illustrated in FIG. 4.

TABLE 11
Five families having MME gene mutation

| | | | | | | | Disease | | | |
|---|---|---|---|---|---|---|---|---|---|---|
| Gene | | Patient | Clinical | | | Onset | Duration | Family | Consan- | Initial |
| symbol | Mutation | ID | Diagnosis | Age | Sex | (years) | (years) | History | guinity | Symptom |
| MME | c.654 + 1G > A | 4229 | CMT2 | 49 | M | 36 | 13 | sporadic | + | run |
| | | | | | | | | | | disturbance |
| | c.654 + 1G > A | 4309 | AR-CMT2 | 56 | M | n.a | n.a | n.a | n.a | weakness |
| | c.654 + 1G > A | 3676 | CMT2 | 61 | M | 54 | 7 | AR. XD | − | gait |
| | | | CMTX | | | | | | | disturbance |
| | c.661C > T | 4590 | CMT1 | 58 | M | 48 | 10 | AR | + | gait |
| | p.Q221X | | | | | | | | | disturbance |
| | c.1861T > C | 4185 | AR-CMT2 | 63 | M | 50 | 13 | AR | + | gait |
| | p.C621R | | | | | | | | | disturbance |

| | | | | | | Nerve conduction | | | |
|---|---|---|---|---|---|---|---|---|---|
| | | | | | | study | | | |
| | | | | | | Median nerve | | | |
| Gene | | MMT | Sensory | CNS | | DL | dCMAP | MCV | Nerve |
| symbol | Mutation | (TA) | Disturbance | involvement | Type | (ms) | (mV) | (m/s) | biopsy |
| MME | c.654 + 1G > A | 2 | + | — | axonal | 4.3 | 4.5 | 42.8 | n.a |
| | c.654 + 1G > A | 1 | + | — | axonal | 3.6 | 10.0 | 53 | n.a |
| | c.654 + 1G > A | 4 | + | — | axonal | n.a | n.a | n.A | n.a |
| | c.661C > T | 3 | + | — | axonal | 4.3 | 4.5 | 37.4 | n.a |
| | p.Q221X | | | | | | | | |
| | c.1861T > C | 4 | + | — | axonal | 6.3 | 3.2 | 45.5 | intermediate |
| | p.C621R | | | | | | | | deficit of |
| | | | | | | | | | myelinated |
| | | | | | | | | | fibers, |
| | | | | | | | | | Onion bulb |
| | | | | | | | | | (—) |

[0170] In segregation analysis for patient ID: 3676 (IV-3) using Sanger method (detection of a mutation in the sequence GTAATTCATgtaagtt (SEQ ID NO: 17, the amino acid sequence contains VIH)), as an example, a homozygous mutation of c.654+1G>A was found in MME of his female cousin (IV-9), who was an affected individual, and a heterozygous mutation of c.654+1G>A (indication of being a carrier) was found in MME of his sons (V-1) and (V-5), who were healthy individuals, and thus cosegregation in the family was confirmed (FIG. 5).

[0171] According to clinical information on five cases with MME mutation, the age of onset was 35 years old or older in all of the five cases and parents had consanguineous marriage in three cases. In three cases of four cases in which a nerve conduction test was conducted, the motor nerve conduction velocity in the median nerve was 38 m/s or higher, and the cases were determined to be an axonal type. In another case (patient ID: 4590), the motor nerve conduction velocity in the median nerve was 37.4 m/s, which indicated an intermediate type, and both of the tibial nerve CMAP (compound muscle action potential) and the sural nerve SNAP (sensory nerve action potential) in the lower limb could not be elicited, and the patient was clinically diagnosed as axonal motor sensory neuropathy. Neurological symptoms other than neuropathy were not found for all four cases.

### <Two Families Having FAT3 Mutation>

[0172] In the cases obtained here, the mutations in FAT3 gene found were a missense mutation on exon 9 (c.6122C>A, p.P2041H) (a mutation of cytosine to adenine at position 484856 of SEQ ID NO: 3, a mutation of a proline residue to a histidine residue at position 2041 of SEQ ID NO: 4) for patient ID: 3743; and a missense mutation on exon 18 (c.11327G>A, p.C3776Y) (a mutation of guanine to adenine at position 530415 of SEQ ID NO: 3, a mutation of a cysteine residue to a tyrosine residue at position 3776 of SEQ ID NO: 4) for patient ID: 3887 (Table 12).

TABLE 12
Two families having FAT3 gene mutation

| | | | | | | | Disease | | | |
|---|---|---|---|---|---|---|---|---|---|---|
| Gene | | Patient | Clinical | | | Onset | Duration | Family | Consan- | Initial |
| symbol | Mutation | ID | Diagnosis | Age | Sex | (years) | (years) | History | guinity | Symptom |
| FAT3 | c.6122C > A | 3743 | CMT2 | 25 | F | 2 | 23 | AR | +second | gait |
| | p.P2041H | | DSS | | | | | | cousin | disturbance |
| | c.11327G > A | 3887 | CMT2 | 62 | M | 35 | 30 | AR | + | muscle |
| | p.C3776Y | | | | | | | | | cramp |

| | | | | | | Nerve conduction | | | |
|---|---|---|---|---|---|---|---|---|---|
| | | | | | | study | | | |
| | | | | | | Median nerve | | | |
| Gene | | MMT | Sensory | CNS | | DL | dCMAP | MCV | Nerve |
| symbol | Mutation | (TA) | Disturbance | involvement | Type | (ms) | (mV) | (m/s) | biopsy |
| FAT3 | c.6122C > A | n.a | + | +swallowing | unknown | ND | ND | ND | n.a |
| | p.P2041H | (severe) | | disturbance, | | | | | |
| | | | | tongue atrophy | | | | | |
| | c.11327G > A | 0 | + | +swallowing | unknown | n.a | n.a | n.a | high reduction |
| | p.C3776Y | | | disturbance, | | | | | of |
| | | | | tongue atrophy, | | | | | myelinated and |
| | | | | hoarseness | | | | | unmyelinated |
| | | | | | | | | | fibers |

[0173] In both cases, parents had consanguineous marriage and the muscle strength of the distal part of the lower limb was highly weakened, and sensory disturbance was found. In a nerve conduction study for patient ID: 3743, the motor and sensory nerve in the limbs was not elicited at all. On sural nerve biopsy of patient ID: 3887, a remarkable decrease in the density of myelinated and unmyelinated fibers and chronic axonal degeneration with poor reproduction were observed. In both cases, surprisingly, the patient was presenting with the similar cranial nerve symptoms such as dysphagia and tongue atrophy. In segregation analysis for patient ID: 3743 using Sanger method (detection of a mutation in the sequence AGTCCCCTTTG (SEQ ID NO: 18, the amino acid sequence contains VPF), a heterozygous mutation of c.6122C>A, p.P2041H (indication of being a carrier) was found in FAT3 of each of his father (IV-1), his mother (IV-2), and his younger sister (V-3), who were each a healthy individual, and thus cosegregation in the family was confirmed (FIG. 6A). In segregation analysis for patient ID: 3887 using Sanger method (detection of a mutation in the sequence TGTGTGTCCGC (SEQ ID NO: 19, the amino acid sequence contains VCP), a heterozygous mutation of c.11327G>A, p.C3776Y (indication of being a carrier) was found in FAT3 of his father (I-1) and his younger sister (II-2), who were each a healthy individual, and thus cosegregation in the family was confirmed (FIG. 6B).

### <Two Cases Having SELRC1 Mutation>

[0174] In the cases obtained here, the mutations in SELRC1 gene found were a missense mutation on exon 2 (c.115C>T, p.R39W) (a mutation of cytosine to thymine at position 5508 of SEQ ID NO: 5, a mutation of an arginine residue to a tryptophan residue at position 39 of SEQ ID NO: 6) for patient ID: 4348; and a missense mutation on exon 1 (c.17A>G, p.D6G) (a mutation of adenine to guanine at position 57 of SEQ ID NO: 5, a mutation of an aspartic acid residue to a glycine residue at position 6 of SEQ ID NO: 6) for patient ID: 4040 (Table 13).

TABLE 13
Two families having SELRC1 gene mutation

| | | | | | | | Disease | | | |
|---|---|---|---|---|---|---|---|---|---|---|
| Gene | | Patient | Clinical | | | Onset | Duration | Family | Consan- | Initial |
| symbol | Mutation | ID | Diagnosis | Age | Sex | (years) | (years) | History | guinity | Symptom |
| SELRC1 | c.115C > T | 4348 | CMT2 | 16 | F | 4 | 12 | sporadic | − | gait |
| | p.R39W | | | | | | | | | disturbance |
| | c.17A > G | 4040 | CMT2 | 57 | M | <10 | 50 | AR | + | foot |
| | p.D6G | | | | | | | | | deformity |

| | | | | | | Nerve conduction | | | |
|---|---|---|---|---|---|---|---|---|---|
| | | | | | | study | | | |
| | | | | | | Median nerve | | | |
| Gene | | MMT | Sensory | CNS | | DL | dCMAP | MCV | Nerve |
| symbol | Mutation | (TA) | disturbance | involvement | Type | (ms) | (mV) | (m/s) | biopsy |
| SELRC1 | c.115C > T | n.a | + | cerebellar | axonal | n.a | n.a | 55 | significant reduction of |
| | p.R39W | | | ataxia, | | | | | myelinated fibers, onion |
| | | | | intellectual | | | | | bulb (+), axonal |
| | | | | disability | | | | | degeneration (+) |
| | c.17A > G | 0 | + | cerebellar | axonal | 3.75 | 8.2 | 52.1 | significant reduction of |
| | p.D6G | | | ataxia | | | | | large myelinated fibers, |
| | | | | | | | | | mild demyelination |

[0175] The parents of patient ID: 4040 had consanguineous marriage. In both of the two cases, the patients were clinically diagnosed as axonal CMT2 before the genetic test, and the onset had occurred in the infant stage in both cases. In a nerve conduction study, the motor nerve conduction velocity in the median nerve was over 50 m/s for both cases, and they were classified as an axonal type. On sural nerve biopsy, a significant reduction of large myelinated fibers was observed for both cases. The onion bulb formation and axonal degeneration were found for patient ID: 4348. The number of large myelinated fibers was significantly reduced to 0 to 2 fibers per nerve bundle for patient ID: 4040. Surprisingly, both patients had similar phenotypes characterized by mild cerebellar ataxia and cerebellar atrophy on MRI (FIGS. 7C and 8C). On single photon emission computed tomography for patient ID: 4040, mild decreased cerebellum blood flow was observed.

[0176] In segregation analysis for patient ID: 4040 using Sanger method (detection of a mutation in the nucleotide sequence ATGGTGGACTTCCAG (SEQ ID NO: 20), the amino acid sequence MVDFQ (SEQ ID NO: 21)), a heterozygous mutation of c.17A>G, p.D6G was found in SELRC1 of each of his mother (I-2), his older brother (II-1), and his older sister (II-2), each an healthy individual, and the mutation was not found for his younger brother (II-4), and thus cosegregation in the family was confirmed (FIG. 7A).

[0177] FIG. 7B shows interspecies comparison of a partial sequence containing Asp6 in the amino acid sequence encoded by SELRC1 gene (SEQ ID NO: 6). The sequences before and after Asp, the sixth amino acid of a protein encoded by SELRC1 gene, are relatively conserved among species, which suggests that the conservation of the sequence is likely to be important for the function of the protein.

[0178] In segregation analysis for patient ID: 4348 using Sanger method (detection of a mutation in the sequence TGCTATCGGCTG (SEQ ID NO: 29), the amino acid sequence CYRL (SEQ ID NO: 30)), a heterozygous mutation of c.115C>T, p.R39W (indication of being a carrier) was found in SELRC1 of his farther (I-1), a healthy individual, and the mutation was not found for his mother (I-2), and thus cosegregation in the family was confirmed (FIG. 8A).

[0179] FIG. 8B shows interspecies comparison of a partial sequence containing Arg39 in the amino acid sequence encoded by SELRC1 gene (SEQ ID NO: 6). The sequences before and after Arg, the 39th amino acid of a protein encoded by SELRC1 gene, are relatively conserved among species, which suggests that the conservation of the sequence is likely to be important for the function of the protein.

### <Two Cases Having CAD Mutation>

[0180] In each of two cases of patient ID: 4539 and patient ID: 3353 obtained here, the translated region of CAD (carbamoyl-phosphate synthetase 2, aspartate transcarbamylase, and dihydroorotase) gene had two heterozygous missense mutations, and the mutations were suspected to be compound heterozygous mutation (Table 14).

TABLE 14
Two families CAD gene mutation

| | | | | | | | | Disease | | | |
|---|---|---|---|---|---|---|---|---|---|---|---|
| Gene | | | Patient | Clinical | | | Onset | Duration | Family | Consan- | Initial |
| symbol | Mutation | Genotype | ID | Diagnosis | Age | Sex | (years) | (years) | History | guinity | Symptom |
| CAD | T166I | CH | 4539 | AR-CMT2 | 60 | F | 39 | 21 | AR | − | gait |
| | R168Q | | | | | | | | | | disturbance |
| | R834H | CH | 3353 | AR-CMT2 | 59 | M | 56 | 3 | AR | + | gait |
| | L1653R | | | | | | | | | | disturbance |

| | | | | | | Nerve conduction | | | |
|---|---|---|---|---|---|---|---|---|---|
| | | | | | | study | | | |
| | | | | | | Median nerve | | | |
| Gene | | MMT | Sensory | CNS | | DL | dCMAP | MCV | Sural nerve |
| symbol | Mutation | (TA) | disturbance | involvement | Type | (ms) | (mV) | (m/s) | pathology |
| CAD | T166I | 4 | + | facial | axonal | 3.4 | 12.8 | 58.7 | n.a |
| | R168Q | | | weakness | | | | | |
| | R834H | 2 | + | — | axonal | 5.1 | 8.3 | 46.9 | n.a |
| | L1653R | | | | | | | | |

[0181] Patient ID: 4539 had heterozygous mutations of c.497C>T, p.T166I (a mutation of cytosine to thymine at position 5131 of SEQ ID NO: 15, a mutation of a threonine residue to an isoleucine residue at position 166 of SEQ ID NO: 16) and c.503G>A, p.R168Q (a mutation of guanine to adenine at position 5137 of SEQ ID NO: 15, a mutation of an arginine residue to a glutamine residue at position 168 of SEQ ID NO: 16) in CAD gene. Patient ID: 3353 had heterozygous mutations of c.2501G>A, p.R834H (a mutation of guanine to adenine at position 14691 of SEQ ID NO: 15, a mutation of an arginine residue to a histidine residue at position 834 of SEQ ID NO: 16) and c.4958T>G, p.L1653R (a mutation of thymine to guanine at position 21139 of SEQ ID NO: 15, a mutation of a leucine residue to an arginine residue at position 1653 of SEQ ID NO: 16).

[0182] In the family history of patient ID: 4539, the parents were not affected and his younger brother was diagnosed as CMT, which suggested autosomal recessive inheritance. In the family history of patient ID: 3353, the parents had consanguineous marriage, which suggested autosomal recessive inheritance. In both of the two cases, the onset had occurred at or after the adult stage, and the patients were clinically diagnosed as axonal motor sensory neuropathy on the basis of findings in a nerve conduction study. Segregation analysis was not performed for the two cases. A protein encoded by CAD is a multienzyme complex having the first three enzymatic functions in the de novo biosynthesis pathway of pyrimidine nucleotide (C: carbamoyl-phosphate synthetase (CPS II), A: aspartate carbamoyltransferase, D: dihydroorotase). Although the function of CAD in peripheral nervous system is unclear, CAD is known to be present in the cytoplasm and closely associated with cellular proliferative potential, and to have a high activity in normal cells with active division and proliferation in thymus, testis, spleen, etc., and in various tumor cells.

### <Four Genes Having Homozygous Nonsense Mutation>

[0183] The present inventors further found four genes as candidate genes for AR-CMT having a homozygous nonsense mutation: ABCC3 (ATP-binding cassette, subfamily C (CFTR/MRP), member 3), ANKRD7 (ankyrin repeat domain 7), CNGA4 (cyclic nucleotide-gated channel α4), and COL6A6 (collagen, type VI, α6) (Table 15).

TABLE 15

| | | | | | | | | | | Allele Frequency in | | | | |
|---|---|---|---|---|---|---|---|---|---|---|---|---|---|---|
| | | | | | | | | | | Japanese control | | | | |
| | | | | | | | | | | Frequency | | | | Number |
| | Number | | | Nucle- | Amino | | | 1000 | | of alter- | Genotype count | | | of |
| Gene | of | Chromo- | | otide | acid | Geno- | Varia- | ge- | | native | Ref/ | Ref/ | Alt/ | Samples |
| symbol | patients | some | Position | change | change | type | tion | nomes | dbSNP | allele | Ref | Alt | Alt | Covered |
| ABCC3 | 1 | chr17 | 48764928 | C > T | R1438X | Homo | Nonsense | — | — | 0 | 0 | 0 | 0 | |
| ANKRD7 | 1 | chr7 | 117874773 | G > T | E105X | Homo | Nonsense | — | — | 0.004 | 761 | 6 | 0 | 767 |
| CNGA4 | 1 | chr11 | 6261928 | C > T | R302X | Homo | Nonsense | — | — | 0.012* | 391 | 1 | 0 | 392 |
| COL6A6 | 1 | chr3 | 130282181 | C > T | Q112X | Homo | Nonsense | — | — | 0.02 | 299 | 1 | 0 | 300 |

*The allele frequency of CNGA4 includes in-house disease control database (N = 388).

[0184] In the cases obtained, the mutation found in ABCC3 gene was a homozygous nonsense mutation on chromosome 17 (48764928 C>T R1438X) (a mutation of cytosine to thymine at position 52711 of SEQ ID NO: 7, a mutation of an arginine residue to a termination codon at position 1438 of SEQ ID NO: 8).

[0185] In the cases obtained, the mutation found in ANKRD7 gene was a homozygous nonsense mutation on chromosome 7 (117874773 G>T E105X) (a mutation of guanine to thymine at position 10281 of SEQ ID NO: 9, a mutation of a glutamic acid residue to a termination codon at position 105 of SEQ ID NO: 10).

[0186] In the cases obtained, the mutation found in CNGA4 gene was a homozygous nonsense mutation on chromosome 11 (6261928 C>T R302X) (a mutation of cytosine to thymine at position 5205 of SEQ ID NO: 11, a mutation of an arginine residue to a termination codon at position 302 of SEQ ID NO: 12).

[0187] In the cases obtained, the mutation found in COL6A6 gene was a homozygous nonsense mutation on chromosome 3 (130282181 C>T Q112X) (a mutation of cytosine to thymine at position 3004 of SEQ ID NO: 13, a mutation of a glutamine residue to a termination codon at position 112 of SEQ ID NO: 14).

[0188] All of these mutations had not been registered in known databases, and relation to the onset of CMT was suggested.

[0189] All publications, patents, and patent applications referred to herein are directly incorporated herein as reference.

1. A method for acquiring data for diagnosis of autosomal recessive inherited Charcot-Marie-Tooth disease (CMT), wherein a mutation(s) in MME (membrane metallo-endopeptidase) gene, FAT3 (FAT tumor suppressor homolog 3) gene, and/or SELRC1 (Sell repeat containing 1) gene in a biological sample are/is detected.

2. A method for acquiring data for diagnosis of Charcot-Marie-Tooth disease, wherein a mutation in a DNA in a biological sample is detected, and the mutation is one or more mutations in the nucleotide sequence represented by SEQ ID NO: 1, 3, or 5.

3. The method according to claim 1, wherein the mutation is any non-synonymous mutation of missense mutation, nonsense mutation, and frameshift mutation.

4. A method for acquiring data for diagnosis of Charcot-Marie-Tooth disease comprising:
determining a nucleotide sequence of MME gene in a sample; and
comparing the sequence with a nucleotide sequence represented by SEQ ID NO: 1 to determine the presence or absence of a mutation.

5. The method according to claim 4, wherein the mutation is one or more of a mutation on a splice donor site between exons 7 and 8 in MME gene (c.654+1G>A) (a mutation of guanine to adenine at position 37341 of SEQ ID NO: 1), a nonsense mutation on exon 8 in MME gene (c.661C>T, p.Q221X) (a mutation of cytosine to thymine at position 39106 of SEQ ID NO: 1, a mutation of a glutamine residue to a termination codon at position 221 of SEQ ID NO: 2), and a missense mutation on exon 19 in MME gene (c.1861T>C, p.C621R) (a mutation of thymine to cytosine at position 88926 of SEQ ID NO: 1, a mutation of a cysteine residue to an arginine residue at position 621 of SEQ ID NO: 2).

6. A method for acquiring data for diagnosis of Charcot-Marie-Tooth disease comprising:
determining a nucleotide sequence of FAT3 gene in a sample; and
comparing the sequence with a nucleotide sequence represented by SEQ ID NO: 3 to determine the presence or absence of a mutation.

7. The method according to claim 6, wherein the mutation is one or more of a missense mutation on exon 9 in FAT3 gene (c.6122C>A, p.P2041H) (a mutation of cytosine to adenine at position 484856 of SEQ ID NO: 3, a mutation of a proline residue to a histidine residue at position 2041 of SEQ ID NO: 4) and a missense mutation on exon 18 in FAT3 gene (c.11327G>A, p.C3776Y) (a mutation of guanine to adenine at position 530415 of SEQ ID NO: 3, a mutation of a cysteine residue to a tyrosine residue at position 3776 of SEQ ID NO: 4).

8. A method for acquiring data for diagnosis of Charcot-Marie-Tooth disease comprising:
determining a nucleotide sequence of SELRC1 gene in a sample; and
comparing the sequence with a nucleotide sequence represented by SEQ ID NO: 5 to determine the presence or absence of a mutation.

9. The method according to claim 8, wherein the mutation is one or more of a missense mutation on exon 2 in SELRC1 gene (c.115C>T, p.R39W) (a mutation of cytosine to thymine at position 5508 of SEQ ID NO: 5, a mutation of an arginine residue to a tryptophan residue at position 39 of SEQ ID NO: 6) and a missense mutation on exon 1 in SELRC1 gene (c.17A>G, p.D6G) (a mutation of adenine to guanine at position 57 of SEQ ID NO: 5, a mutation of an aspartic acid residue to a glycine residue at position 6 of SEQ ID NO: 6).

10. A primer or probe for detection of autosomal recessive inherited CMT, being a nucleic acid consisting of a nucleotide sequence represented by any of SEQ ID NOs: 1, 3 and 5 or a partial nucleic acid thereof.

11. A DNA chip for detection of autosomal recessive inherited CMT, comprising the probe according to claim 10.

12. A kit for detection of a mutation in MME gene, FAT3 gene, and/or SELRC1 gene in a biological sample to be used in the method according to claim 1.

13. The method according to claim 2, wherein the mutation is any non-synonymous mutation of missense mutation, nonsense mutation, and frameshift mutation.

The application's sequence listing, which the Patent Office published only in electronic form, follows.

SEQUENCE LISTING (34 sequences)

SEQ ID NO: 1 - DNA, 104083 bp, Homo sapiens
  5'UTR (1)..(110)
  5'UTR (4512)..(4521)
  exon (4522)..(4681)
  exon (5413)..(5448)
  exon (35348)..(35509)
  exon (36833)..(36913)
  exon (37018)..(37113)
  exon (37222)..(37340)
  exon (39100)..(39165)
  exon (58456)..(58590)
  exon (60545)..(60646)
  exon (62345)..(62481)
  exon (62591)..(62684)
  exon (63797)..(63925)
  exon (64713)..(64811)
  exon (67498)..(67578)
  exon (68904)..(69007)
  exon (80744)..(80802)
  exon (87256)..(87375)
  exon (88846)..(88979)
  exon (89086)..(89151)
  exon (92471)..(92566)
  exon (92890)..(92966)
  exon (100714)..(100813)
  3'UTR (100814)..(104062)
gagagcgccgagacgcgcggggcgcggagatgtgcaagtggcgaagcttgaccgagagcaggctggagcagccgcccaactcctggcgcgggatctgctgaggggtcacggtgagtctctgtgggtgcgggtcggagggatgcccaggtgcctcgtcgccccacggcccgggcggaggcgggtccggaacctcccccaagtccggcctcagcctggagcccgcgcgccttgggcggatgcacggactgagaggcgcttggctgggctctcagcccgccactgccacccggccccgtgcgctcattggtcgggatgtgtcggctcagcagcctccaacttctcccgaatcccactggtgagtcccaggagagcgagctgagggagaaaggtccaaagggcgcgagcgcccagggcgctgggagcccgtgggacgggcacggggagggcagagccagccgaggggagcggctgccgggaggtgcgctgagcagggtccgcagctaaggtccagcgcgatccgagcgcccaggaccctgcggccgtggaggaggcgtgccctgggaaggagccgctactgggacctgaagagtgaggggagggagaggggcccagagggtgacctggaggagggctctggaagtcacgtcaggttggctcttcaggttcatttccatagttccctgcggcctctgccttggggagttatgttttgttaccgagatccgcgctaccagattgcaccggggctgatttgggggctgggaatttgccattctgctgtacagacactgatttttttttcttctttttaaaaagcaaggtttgttttcattttggtttctgtcggattttctcatttgtaactcacttttctatttttacttttcttaaccggaagatcttttcattatcccacctcttcatcttgcttttaacctgatttcctattatataattaatgcttaaatctcacaagggttggtcggtgcggggctggtgtgtccttttgtagatgaaagtttaagacctcttaactggtttcagtctatttgtctggtttcaaaataagggtaattgcaaccaaatatccctctttagcttctcgatcaagtcgattcctcccccatatatgattcaaatggcaattttattaaactgaaaactagtacctgacttgcagcgtcagcatttggaaagtgcttgtcggcaaatcgactgtatgaaggcgtgtagcttcatcccctgccatttttgtgggttctagcactttaaaaaattgtctggtaatttcttggacttaaccctgtgtctttggttgtagagcagcactaaccaggggagtaatatggttggcacttcgtgtccagaactccgtatttcaggctgggaaacacctaattaatgtctgggaaacaagaagatgatttatcctgagtacctctgtcctcagcttctgcagacacagtttaaatatggaaactgtttctccttcttcctgtgcctcagtttccatagaacaaactgtaattgcatagcacagcttcaggaacctgcagatataagttaatgttataatgtgcagtgaagatgaaaactgcttagctaagtctaagtctgtaagtcaatgagatttcctttttaacaaatcagttatccaggtttcctgctttgactgtctgatatagtaatgcttatgctcaactggtataagaattgctgctttacattgctttgaaattaagcttacacttaaaatagtaatttattctgttggtaatattgtcgagctgaagtttgcaggttcttgttatcttagacctcctaattctctattctcgtctgtggcagtgtccacttttccgtttaaactttttatttaacacatcttcagttgaagtgaaatattttaagaatacaggtatgtttttgcgtaccctgctttatatgggactataagcctcaacttggtattttttttttttttgtattcttttgtttacttgtcccccttactcttctctatgggattgggtgtggttaagttggatattcaggtatttggggtttagtcatatgttccacagtgagattccagatactgtcccctgatgtcttaaagaaaaattgtgaaccttccagaattaactggaaatgaacgacaaagttaattaggagattaaacttgcatcatttctgcttttgctcaatgcttttgaaaaaaggctactaagagcaaaagacttcctttaagaatttacagggcatttacaagagggggagatggaggaagactttgcaggtgattcaaagattatattgttttgatgcagcttctgtcactgtcttcatttctctgtaactgtttctgcaaacttgggtgctgacccattaagagcccagctgcttcagtacccagtctcaagggtaaggaggagaagccaagggaaagtaacttacagggagaaagaaatgcttatccactagctttactacaccacaaggcatggagtttccacagagcacctgtaatttaaccctgaggctgccctggttcaccccttcgctttactttacagggacactgactgtcatttctaaggaagaactaagaaaaaaaaaagtccttttataccagtaaaacatttctctacattgtcttctgacatatgcggggggaacaatattcaggaaagggaaatactttagcaaatgtgcttaacattcaggtgttctttaggacagtcatgaaacatggggagactgggagaattattattgtttacctctctgtaaagtgtccagagtattattaaatttgttcccctctttcctttgcccaaccaatacactattaaaataggactacaatcaatgcaattccatatcataaccccaggggtggtgagactaagccagcatgccttacataaccattaagtaagacattttaacattcaggtacattacattccacttttatttagcagacacggttttcattgtgtaataaaatatttttatttgatagtctgtccttgcttatagcctcatgtaatcaaggggacagcatgtttaagactttgtatccagaactttaaggtctagctgtggttcgcttattaataattcactgggaaggttaatttctagttttctgctgggtctcccagaccatacttcaaatgtagaatatgtttcttctttctcctatgcctcagtttccacaaaacacacccttagagaattgtgtgtgttcaacaaagatctttaactataagagcatttctgagccgccacttcatcctgggaccaaattctaagagcaatttgtattgagctataaacagctaatctgctagtttaagatgttcttttatacagtcatgcagaaaaatggaaattgtgtgttctaatccttggagactggctgataaagtgtcactaggcccctgatgaaatttaatatttaggcttatatccccttaattttccccctaaatttctacagtacgcttttactgcatgatgatacagctttattttgaacagtgaccaaatgtgttctttacaaagaatattgacgagttgtgtagtcttgaacacgttgcctgacttctctgtgccccagtttcctaattctttattctattctgtggcagtgtccactttttggtttaaagtttttaacacatctccagttgaggtgaaagattttaggaatacaggtatgtttttgcataccctgctttatacaggactacaagtatcaacttggtaactttttgtactattttgtttacttatcccccttactcccctcttaaatgggattgggcgtggttaggttggatattcaggtatcttttggtacagtgagtgaccattttcagaatgttgtctaaccagttaatagatactggtatcagtagtagtagtaattttgaactgtaaaaataaaggttgtttttatgactaaaataaactacttcatgtgttcattcgttttgctgtttatctatattaatatttcaaattattgcttagtcaaaacctcaaggtattagtcactggtttttgagcttataaaggaagccactggagcaagatataaaattaaccattgatgttagtccagagttcaaaagggtgagtttaaaactttcttaatgatggtacagcaattatttgcttataaactgctgaattaatcctacttgagtatttaaccaagtcttactgtctaattttgctgagattttcagtgatataccaaagcaaaacaaaacaaaacaacagcaacaaaaaacaaaaggttgtgactgagacctgtcaaattcatttggctctatatactttgcattcagcaacaaaattttgacttctcaacagcaaaaatgtatttctattttaaaataactgagccttttacttttatccagccacattaagcatttggacattttcttttttatttatttgtttttcattattagtattttcattttttgcagattttaggtgatgggcaagtcagaaagtcagatggatataactgatatcaacactccaaagccaaagaagaaacagcgatggactccactggagatcagcctctcggtccttgtcctgctcctcaccatcatagctgtgacaatgatcgcactctatgcaacctacgatggtgagttactcccacacctgtgcatccataagtgcaaaagagaaggaaatcttcctccatgcttttaccatctatccaacgaatgtgttaaggatagaggcacttaaagactgacaaagagattcatttataaaatgtaacatcaatatgtcaaaataattaactttgaagtacggtgccttttatgtttgagctaagttattaattgcaagtatatttagtgcgctcacgcttacttatgaggaatctaaagtatggttttatttgattaaaatatacacaattttatggccagctttagtaatagtcattagtcaacttttgttgtgtcattgaaattctaaacggcttcacaggaatttaacaaatttaatttgagtcttggaagttttttacaacaaggatgaaaaaagattgattgtttaatggttaaaaaaatgattaccaagcaaaaacaactgattatttcaatttaataggcctggggcttcgttggtagagaagatataataacacatttttcttcataatcaaaattttaaatttagattttacttattttattttcttatattttttctaaccactgacaatgatatataatgttcagtttttagttcttgctttaagaaattgcttatttaattggcagtttttaaaagaacaaaagaaaaatagaaatttaaaaatttgtgttgccaatatttatgtatattctctcctttttctagatggtatttgcaagtcatcagactgcataaaatcaggtaagaaatggtttttacgtgtaatagttatacaactgatgtataatatttaaaattaaatgctaatcttaatttgctttgtttacacttttattcattgtagatcaattatttatgtgtctggctctataatcaatggaaataaaaatatatttaagtagtagattaattaacttgtttactctgaaaaatatattactattttcagccctgggctgtatagcagggcaatagaaaactatatcgctatttgtatggagcttgccatgtagttgaagaaagaaaatgaacacatatgaaatggtaagtttcgtatcattgtgttaaatgtctcagtgcacctcactaggtgggtgagaagaagggagtgagatgtaggcatgtaaatctaggtggagaagttaaaatctgggaagaaatttcattttatttattttttttattttttatattttgagacagagtctcgctctgtcgcccaagctggagtgcagtggcgtgatctcggctgactgcaatctccgcctcccgggttctagcaattctcctgcctcagcctcccaagtagctgggactacaggtacccaccaccacgcctggctaattctgtatttttggtagagacggggtttcaccatattgatcaggctggtttcgaactcctgccctcaggtgatctgcccccctcggcctcacaaagtgctgggattacaggcgtgagccaccgcacccagccttaaatttgggaagaaccttgaagcagggctagaatttagatgtggcggtgcagaagagggaattccaaacacaaaagaaagaaactatgttattgagaagtagtaaaagtgtacgcttgatagaaggacacattatggagaaccttgaaatccatgtttagccttgatattgtaatacaggagaaacagatatttttgaacagaggagtgatcaggccaaaggtgaaagatgattctgcgaatgtgaggttgactggattgagtgaaaaggagggcaggcaggtgggggctgcttctgtactccaagtgtaagctgaagaggttggcctgtggtgagagaagagtactattgagataatggggagggagaattgggtgactcagtagaactgacttgctaaataaaatgaatgaattgagaatgatgccaagttttaaaacccaagggactaaagagaatggaggcagcccacacagaaatagagaggttatgaggtggatgtggatgtgtttggtctaagatgaaaatagacaggaggaaggtagagatgaggtttaagaagctggaatttggatttgagatctgtcagtttaggagtgatagtggaagccttggaagtatttgagttctcaaaagaagagaagaggttcaagggctaaacttaagaagaggttcaagggctaaacaacatcaatgattagaagagaagaaaaataagtcagagcagaaaacagagaagtgtatgaagctatataaatcccatcaattggagtgtggtgaaaatgggagtatttcttctttcttcaagaaaaaggaaggtggtagctgagggcagcacctgggatatgaacacaatatttgtgtcctttaacaagagattctaaacctcctttctaacatctatgtgtcttataagaaataaataaactgttccaaataattttaaccattttctgctggatatttttaattttatttatttatttatttgaggcaggatcttgctctgtcacccaggctggagtgcagtattgtgatcacagcttactgcagccttgatctcctgggctcaaggcatcctcctgcctgagcctcctgagtagctgggactataggcacctgccaccattcctggctaggttgtgggttttttgttttttttgtttttttttgttttttttttttgtagagacagggtctcactatgttgcccaagcttggtcttgaactcctgagatcaagcagtcctcctacttgtcttcccaaagtgctgggattacaggcatgagccactgcacccagtcttggatattctttacttggatttttgttattcactgaactttgcaaaaaaatgacgggaaaatatctggcaattctaggttatagtctaatatcctgaatctgtgccctttggtttttttttttttttgtatcgttttttgatggatttttttgctctgggtcacaagagcaatgactagacaccctgagatgtgatgtggggagcgtgagggagacttgatttagatgttagccatttgctgctcgacatagtaagtttttcccaaaaacgaagtttctttattccccagggaaatggctgcacaggtaccttggctgggggatctccgtggtcatgtgcaaaagtcagcatgtgcccaagttgtcaaagttaacgtttacttcctccccagatcctcctatgcttcctctctctaccagctaccctattatatgctcaggctgtcctgtttcgggaaacttccacttacatattgactactaagggttaattcctctgtctttaatacacttgacatgtctctttggtatcttaatctatagattctctcttctctcactatttttcctttttctcttcttttccttgaattttattttcgaagaaactggattttttgactaggtaggtgtatttctataaacgacaagtgattttgcctcagagatctaggcaggtttttcctcccaaggagcaatgtgacattcagaatctggaatcttaaatgtgacttaatgtttagagataggatttttaaatagtgtttggcaagtctcaactcactaaaatgtatttaacctgtatcctttaattgtagcttagaaatcaaaccaaatgtaaaacaccttgcaggatgtatcttggcagagaaatgtatacaatagaaataacttcagtggtaaacaaggttgctgtatagctgtatatttttcttcattctgctctgttggttcacaagccattagaatacttgttcacattggtagttactattcttcctaggagaataaataagatgacacacaccctcatggatacactctgcatactcataaacacacacactcgtgcgcgcacacacacacacacacacagtcttctgctggttaggaaatcttttctgccacagaaaaatacaactatttcttttagaagttgttgcaaattaggaaaaccctagaggaaatcttggacaaaagcaagtattaaagaagagtggccagagtagagtagatggaaagaaaaagaaatgtgaaaagagaaggctgggcacggtggctcacgcctgtaatcccagcactttgggaggctgaggcgggcagatcacctgaggtcgagagttcaagaccagcctgaccaacatggagaaaacccatctctactaaaaatacaaaattagccgggtgtggtggcgcatgcctgtaattccagctactcaggaggctgaggcaggagaattgcttgaacccaggaggtggaggttgcagtgagctgagattgcgccattgcactacagcctgggcaacaagactgaaactccatctcaaaaaaaaaaaaaaaagaaaagaaagaaatatgaaaagagagatgttgaaaaaatataaaatatcttaccagcaagtctataggtcactttaagagagtgggtgggttcaaacctgagctcagaaattcttgagaatgggaaaagcaagtattgacactcagggtgcttacattatatgaaagatggccccaacttgaacctttcttccagtggaagggaatgtcatagcaaatgtacttatctttgattctttgaagtcaaggaatacagaagtcaagccataccaagacagaagtaaaatattgcagaaggctgtttcaaatctgtttggtgttacatatttaaaatctgagcatctaggatttaaatatttatgatgtacataaaatgatgtttatgtatactttaaattaacttgcctatatgtgtaatgcatcagtatgaaagattacaccagacctaaagtaaaacaaataccacttaagaaataacaacttaaggcagggatcaaaatgcttcaaagtattattcatcgcttatttaccctataaggtcatcaaaaacttagagttataaaacttgtatgtgattttgcagacttttccgtgtaagtctgaatcctgaaactgatttccattgcattgtaacctccctaacttagatttcaaggaatcttgtgctttaaatcagggtttctcaactcaatcactattgatatttttgtgctagataattcttcgttgtggatgctattctgtgtattataggatatttagtagcatccctggcctctaccaactagatgtccagtagcagtcctctcctagttgtgacaaccaaaaaatgtctctagccattactaaatgtcccctgcaggcagcacggtcacttatgactgggtaccactggtttaaacggtctcaagatgttatcaatgcttccctcttaacggtaggcaggataatggcctctcaaagatattcacacccaattcccagagcctctgaatatgttgccttatatggcaacatgcctgtaatcccagcactttgggaggccaaggcgggtggatcacttgaggtcgggagttgaagaccagcctggcctacatggtgaaaccccatctctgctaaaaatacaaaaatccaggcatggtagcacgcgcctataatcccagagggaggagaattgcttgaacccaggaggcagaggttgaagcgagccaagattgcacgactgcactccagcctggaagacagcgcaagactctatctccaaaaaaaagaaaaagacaacagagaattgaggggtctgcagaagcatatgttagaagtgtggtcctaaattatccagaggccagagaagccaagctaagacgtgatcaatacagtttacaagagaaagtgggaccacctccacctgtatagtcatgcaggttgtacactgcatatttgtcgatggcagccttgacagacaggcttgtggaacatcaagacctggatgaaacacctctcagaactgtccactccttttattttaattctgcacataccaagaaaacttttgatgattacttaattattaatacaaggagaggtggcattctgttacttgaaagatattttcatcatggtgagataatgcacagcggtccccttcttatcctctgaggatcccccaagacctcagtggatgtctgacactggactgaaccctatatatgctatattttttctgtatacatacctatgataaagtttaatttataaattagacaaagattaataacaataattaataaaaaataaaacgattataatattattccagcatcactattcttatggtttggggccattattaagtaaaatagggttacttgaacacaaacaccatcatcctgcaacagttgatatgataataatggagaaggctccttcgtgactttcatcatgctactcagaatggtgcgtgatttaagacatatgagttgtctgtttctggaattttctatttaatatattggactgtagttgaccatgggtaacaaaccatggaaagtgaaaccacagatatgggggagactactgtacgcacatactgatttaatcagatttgtgtgctttgagctatgaccctggaactgaaatgaagcttgcaaatgtctgcaagggccagatcatggtgatgccctaggtgatgcatcttggcaacagctagccttctcctggctgtcacaaggcatctctgccttcttgcctgttaacaccttgaaacctccatgaaggaaaacagcacaattaggtaaatacaggaaggactgatggctaactcatgggggctactggccctgtagcagccttttagtgtaggaaatgaggctatttcattatgtagttaagtttggaaaaaatccttcatggaataagaaagcagcagacatcttagtaggaagaccactgaagcacacctttgttaatttaaatgtggcatgtggcaatttgctttgtgtggcttccctggcacaattctcgtgaaaattgtgtagggatattaccttacatttatccagtcaaaattagcatctgtcaatcagatcctttccaagaaagggaatcagttatatcataaatacacaaatatataacatgtgttttttaccctccagggaaactttaagcaagtagtacaccatcattttttaatgaatggtcaagaaattgaaaacatatataagttgagttaagcagttaaagggaaagacaattagcaatgcctggtaagctaagtggtactccaaaggtttattttatagctacagaaattatctacatgtagagggggtggatacaaactagcttagactggggtgagaatcctggtttgacatttaacattttagaataagagatatagaaagattcctctgtagttgaaggatcctgttttgtcctactcataagcaaatccatggggtagcaaggtgctttctggtaagcctttgatatgatatgaagctcaagttgataaaacagattaattgaaggaaattgaaaaatacgcaatttaaaaaaccataaggagaatgttgcacaagcttttgaatcctgtaaattttcattctttaagaccattcagaaaaggagattttgtcgggggccagtggtggcttgttttgatcctatttctgaaccagctgaaaactagaatacgttctttctgttcaaaacatcctagatgggccacatattagtcaggccttctccagagaacagaaccaatggtatatgtatataaagtctcagtatccaaaggcccaagaacctggagttctgatgtctaagaacaggagaaggtggatgtcccagttccagaagaaacagaggatttcccctccctctgcctcttgttttatctaggccctcaacagattggatgatgctcagccacaatggtggtagagtgtggatcttctctactcagtccactgattcaaatgccactcttttccataaacatcctcacggatgcacccagaaataatgctttagaaataatgctttatcagctatctggatatctcttaacctggtcaagctgatacctaaaattaaccaccacaggctacagtgaaaaagatagttccaactgtgagtgaggatgcggagaaactgaaccatcatacattaatggtgggaatgtaaattttagtacatctggatcaacatgttagaaacattttgaaaaacagtttgataatttttacaaaatgttaaatatatactttccatacaacccagcaattctactcctaggtgttacttaaaataaatgaaaacacatatcctcacaaggacttcattacagcataatgctgtttttataaataatttataaaagccaaaatatggaaatatcccaaatatgtattaacaggtgaataaacaaaatgccatatagctataaactacgataccacacagcaataaaaaggagcaaactactgttatgtgcaatggtgtagataaacatcaaaaacattatgctgagtgaaataagccagacacaaactgcatattgtaaaattcaatttatatgaaatttctataagaagcaaaactataggggcagaagacaaatattggttgcctgaggctggagatgaagcagggattggctgcaaatgggcataaggggacttcttggggtaatggaagtgttctaaaattggactgtgacaaattctcagctttttggctaaagatcaagtgtaaattggattgtggtgatggttgcacaactgtgtaaatttaccaaaaattaatcgggtgaattttatggtatacaaattaataacccaaagccgttaaaaaaaaaaaagcaaacaaaaattcaccttcattctttcccccatctctccaatgtccatttttacatagttatctcatgttttgatcttatgcttgctattgtatgttgagtccattgagctccatttttgcagtttaaatgattatatgtagttttcaatgtagttttcaaatcttcactaaataaactcaagctttttagtttgagtgagcctctattatttaattatattagcaatatattgacgaaaagtctctggaaatagtaaatcaactgggaagttaaaattatttcaggattaggtgttggaagtcctgttttcaccccctggggtttcacttacagaggaagtcaaagacatatgtgtccaggtgtaccagccatctggatcaaagccagaccacttggtctaccacagagcagttagcagttcctgcttctggaaaaatgtgttggtttttcacacaggtgctgcgagatgttttccttttcaccttaactgatagaaagtcaagagccaggacgggcgttttggctcacgtctataatcccagcactttgggaggccgaggcaggtggctcacgaggtcaggagttcaagaccagcctggccaagatggtgaaactctgcctctactaaaaatacaaaaactatctgggcatggtggtggacgcctgtaattccagctactcgggaggctgaggcacaagaattgcttgaacccaggaggtggagtttgcagtgagctgagatcttgccactgcactccagcctgggcgacagagtgagactctgtctaaaaaaaaaaaaaaaagattgaaaaaaagaaaaaagaaaaagtcaagaaccaaatttgaatttaacttgaaattgtaggacttctttgtataaacttgcttcatcagctttattcctattcctcttttctttctcatacaatgtatattagtttattttatgtatccctctaaggccactttgaattattttaggaagaatgtaggttaataatcagatgaatagaatataaattccaacaactgatatgtgcaggagaagggctgttaaattataaactttatttcaaagagatgcaagtgttatgagtaacggaggcacaatttttggaagcttactgcttctttttccactaagccaacttttagcatgggagatctgggatgtaagttttggccacatcctgtgtgattggtatgagatcctaattaagtcagttcagctttctgcatttcattttcattatctacaaaattggaattgaaagtgtctcattttacagggaaacagcaaagactaacgacagcctatttcatgttacacgcccttcagggagatgcaccataggtataatgcacagataggattcatagacatcttatttcatgaaaattgcaaatgcactatttaaaattttttattgagaatcaaataaaaatcaaatcaaaaggcgaacagtgtatttttaaagaggaagttgtagccagaaacagagagaaagaaaaaagagaatgtggtacattttacatattctcaaataaaaatgtgtcatcctttatgaacaacatttgatttgattgctgtgctctgtcttagtatgggggtgacagttcaggctttgaatcaattagaatgagcacaatcagaaatgaacacttgaatctgtgtttcctgtaaagaaaagcctaccatcagggacaccttagtttgtaaacctagctaatctgcactcacccttgccagtaccccttttctcacctctgattaatcccttgaagtaagtaagtcagaggtctgcatcaggagaatgactagatccttggtattcaatgcgtggtccatggaccaacaacagcagcagccactgagaatgtgcaaaaatgcagtctcgggctccgcctcagacctactgaatctgtggctgcactttcagtagcctcttcaggtgatctgcaaaataaggttgagaagcactgaggaatagtgattttcaaatatggctgcttattacaatgatttgggaagcttttgaaatgtacccatactactaaaccttccattcttcctgggcacacaaagtttccatttcttcagtggagtagtttctgttatgtgttaggaggaaaagcaatttaagtaaatgaatagatgttaaggggtataggaattgcctggatatttgcatttttaaaagaaggtacatattgaccaactgattgctttaacaggttcaatttcagactgtgtgctcagtgaagactttaagttagagaggagtgaagactttaagtcagagaggagagacactgagcctgattttctgcttatcgtggacaagctgaacctggaatatcttcctaaatttccccagtgtaatgcaggcatgctatttctgtagagacattagaacaactttttgcctcttccattcattcatttattgatttatctattcattagttaattaattttattttttattttttttagaggcagggtctccttatgttgcccaggttgacctcaacctcttgggctcaagcaatccacacgcctcagcctcccaagcagctagaacaacaggcacatgccaccatacctggcattcatttttttttccacaaaagcattaatcaagcagcttctaaacattgaacactagacattggaaatatgaactaaaataccccctgccgtcaggaaaatgaaaacctggtcagtgtgacagacataaacaacattaccatatggtttgataagtgctatgatggtgataagatttgtgtgctacaggtgccctgagagaggagcacctaaaccagagcgggtctgggagtgggcagctaaagtgatagcaatgaggccgggaaagcagtcgcacttcaccagctaagttctgaaggataattgaattgcccaaccagtgggagcagaggagagcatgtgcatagtctgtatgcaagatggaggcaagagctcaggaagtttaggacctactagtggttcatgatggctgggatgtagaagctagcaagacttgatactagagaagtaaccagggcccaggtcacacagggtcttatatgccatgataaatgggttgcattatctcccgaagtctacagaaaatgaataaaattaaaatgccgcaggggacatctaagggattttaaatagggatgtgtgacattgtcaagattggctgctgtctagctcaagcctggtaaagtggaggcaaagatttacccaaacaaaggaataacattttggtgcccctggtgtgtgagagagcttggcaatattgagaaactgaaagaatatctgtaaggctatcatagagggtgtgtatgaagatatgagagtggaggcaaggagaagtgttcactattggcaaaagaaataagcaggaattggattttgtagtctgtgttaaagtgaatgcacttccttctagtagcggtgggaggtcacagaaggaagggttttaaatgacgcatgactttatcagaattattgagaaagatcactgaatagaaataaagaatggctgtgggcaggaaattgggctactgcacttatttggatgagtattatggttgcctggatttgaatggcaacagtttttattgttgttgctgttgtttgtttgtttgtttgttttgagacagggtctcactctgtcacccaggctggagttcaatggcacaatcacagctcactgtagcctcaacttccccagactcaggcgatcctcccacctcagcctcctgagtagctgggattacaggcatgcaccaccacaccccgttaagttttgtaattttctgtagagatggagtttcaccatgttgcccaggctaagaaatggacagatttgagaaatatttactgggaagtagaattcataaggcacaatgtttctgtaaataggtgaggttgtgaaaaggaagtgaggaaaaggtaactcaagtttctggcttggtaaattgggtgataagtcagctgttcaccaagctagggagcactgaagcagagcttattgggtaataggctgggaccaatgcagtgaagagttcactgtgagatagtttaaatttgagatactggtacatattcgatgtggtagaattcagggaagatggtgttggaaataaagattcgggggtcatcagcatgtggatgatatggttgagatttcttagggaggaaatggagaagagaacccagaattgcatcacataaagcaacatttaaaaatgagaagaggaagaaactccaaaagaaaccgagaagtaatcagagaggtagaaggaaaatcagcgaagtgtaaaatcaccaaagcaaatggaggagcagctgtccaaaattagagagtgatcattggaattaagcacagctgagaggttgagtaggctaaatgttgaaagcagaaaggaagacattgaagattcaggtgaagatcaggtggaaaattgatggattttgtccagaggaagtaaaagaggatgtatatccagagaaaagaatataggatgattccgagataaaggatggcctcctcctcccccttttatttaatactagggagaaagaagccaagatggctgaaatgcaaacatgtttggaagctaggagggacaggaagttgaatgggtcatcatccagttgcctttgtgaagtaacaaacaaaaatctccgcctgggagtgagctggtagagaaagtaagtaaggagagtatgaagactggaaagtgtccatgtgaggagtgggccatgcacacagaactgatggctctgttgaaatggaaggctataacttgaaatggcattaaaccaggcagttgtggggtttctccagcatcaccgataatggcttcaacagatattgtcagcactgttttagatgctaaggatacttagcacctaaacgcagagtgagcaacacaatgtccctgcttacaggagcttacagcagtaaaggagacagtaaataaacacacacacatataaaaaaacattattagatagactagagttggaagggaaaaggaaggcagctggatcaattcagggtaggctcatttgcagggggcaagggaatgaaatactttggtgagatgatggtttcagggatggcaccacaggatgtacactggacagaagatataaaagaaaagtaaagtaaaaaatagagtggctggctgggcgcagtggctcacggctgtaatcccagcactttgggaggccaaggcaggcgaatcaccaggtcaggagatcaagaccatcctggccaacgtggtgaaaccccatctctactaaaaatacaaaaaaattagctgggcgtggtggtgcccgcctgtagtcccagctactcgggaggctgaggcaggagtatcacttgaacccaggaggtggaggttgcaatgagccaagatcgcaccactgcactccggcctgggcggcagagtgagattctgtctcaaaaaaaaaaaagagtggccatggggtgagagttttcagtgaagtcgaggaacaggtgtagagggaataaagaaatgaaacaaacaaacaaacaaaaaacacttctaagaatcagaagattcttattggagaggggggttactcgagatgaagatttcagaggtacaactgttctgggtgatgagaacattaagatgtcgtcatgaaaatgtgtagactaatgtgaagtgaaggtgaaagttaggagagttcagatggtcaagaaattcttaagctagagtgtagcagaggttgtccacagggtctctgatgttacatatcaagatggtagaacttatgtggaagggcagactgcacaaagtgccagagtcttaaacaagcagagatgaatgcctctggagtcagtagaagacagagataaagtaggtgaggcggggatggttgactggcagaagcttaaataagcagagtggacagtaaggatttggctattgcaccaagtgataacagaaaactagttttgcttttccatgttggggcaaggtggagggatatgccacctgatgggattagttcatatggattagtattttcagtacacgtgttgtcatatgtaattatcactcaaaagggtaagcagcaactaataagaagaggtgctggagggccacctgtctggcatatagtgtgggattccatttgatacaattacaaatgaattcatttttactcatttttatcttttcactatcctagataaaaactcaaaatgaatcaatgagttcttatcttaaaacaatatgttctgtttaaacatttctcagcggtataatcttcctttaatcttacatttcttcaatccagaggagtccaactacagtgccttcaccgtgaagctaatgaaaagggagttggtccactgtgtagactagactagatgattgcgaagttaaattgaagtaattgagcaggtacccaatagccagcagcggatttgtttctctgttcttgatgcttaagtaaaaacaagcaagccaagtattaaatggtggagctcctgacaacacagcttcataaaaaagaaactgcttgactcaaggagtgtgtccttgcgatagtttgccgagaatgatggtttccagcttcatccatgtccctacaaaggacatgaactcatcctttttatggctgcatagtattccatggtgtatatgtgccacattttcttaatccagtctatcattgttggacatttgggttggttccaagtctttgctattgtgagtagtgctgcaataaacatacatgtgcatgtgtctttatagcagcatgatttatattcctttgggtatatacccagtaatgggatggctgggtcaaatggtatttctagttcaagaaaaccgaggcaataccattcaggacataggcatgggcaaggacttcatgtctaaaacaccaaaagcaatggccacaaaagccaaaattgacaaatgggatctaattaaactaaagagcttctgcgcagcaaaagaaactaccatcagagtgaacaggcaacctacagaatgggagaaaagttttgcaatttactcatctgacaaagggctagtattcagaatctacaaagaactccaacaaatttacaagaaaaaaacaagcaaccccatcaaaaagtgggcaaaggatatgaacagacacttctcaaaagaagacatttatgcatccgacagacacatgaaaaaatgctcatcatcactggccatcagagaaatgcaaatcaaaaccacaatgagatatcatctcacaccagttagaatggcgatcattaaaaagtcaagaaacaacaggtgctggagaggatgtggagaaataggaacacttttacactgttggtgggagtgtaaactagttcagccattgtggaagacagtgtggtgattcctcagagaaataattttaataatgtttgagtgaatcaaatatacaaatagtattgtgatgcagtgtacccacaatcattaactcaactatgaattactcaaagcactgtagataatagtctagcaaggatctgacaatatgttgagaagaaatgatgcacatgaaaccttgaaagtcaccttaaagaaactcatatcatgcaaatatgaatattttaatagctactataaaatagtagagctgagtgctgtggcacacacctgtagtccagctactcaggaggctgaggcagcaggatcacttgagcccaggagttggagattagcctgggcaatgtggcaagaccccatcttcaataaataaataaataacttagtagcaattggtgctatgaaactttttgatgtagcttggatatttgtcctcgcccaaatctcatgttgaattaatcctcagtgttggaggtggggcctggtgggaggtatttggatcatgggggcagatccctaatgacttggccctgtctttgcaatagtgagtgagttttcatgagatctggttgcttataagtgtgtggaacccccccacccactctcttcctcccgttcttgccacgtgagatgcctgctcctccttcacgttctctcataagtaaaagctccctgaggcctcccaaaaagcagatgctggtgttatgcttcctgtacagcctgcagagccatgagccaattaaacctcttttctttataaattactcagtctcaggcatttctttatggcattgcaagaacagcctaatacattttgcatggtgcatatcaactatggtaataaagtgaaaacaaagaagtgggaagctttgaaaagttgacaaattggttgagtaccatatggaactccagctgtaggatcagtcccattccaggcccaggcactcactggggccaaggtcagtagctcaaacattccacttccagtcagccctactcttggtgatctgcctctgaccccagctctagtaaatgggtttctgccttctcccatagggatttcactcctggctcattccccacttctggaaaatgagtttctttttttcttttctgtcttctgggactgaaatctagcttagctcttaacctcatgaccttttgccagaccacggagaactgaagtttccttggatcaacacacaccatctgctggttatagctccctcctcacagctgccgtgggtgccctccctgtgtgacttatttctgttgcttgtagctgagaacttcttctgttgatggtcctttatagtttaactaaaccgggattcagtctcactgggctagtcaaaccacttctaccagagcccagtttatgtgaatgatgaatgttttacatggaaaaaaaatgtttcttcatttactgaggaaggagcaccttcactgattttgtatgccaacacagacagcgaaggatcctgcttgtccttcacctatcagccatcacacctattaggaggggggaattggtcttttgttttgtttatttagtaaaaggaaatctaattatatattaaaagttaaaaaaattttagatcctgcctacatgactttaaaatgagcaataaaagtcattttttattcagggatagtaacaggaaaaagaagctagtatcagaatgttttaagattccgatacagtgcatatgcaggttttagtttacaaatagcagatggtgatgatttactataagaaggtgtaattaattgagaatgaaggatccttttggagtgtccattatgggctagtcattgtgctaggcgtaggaattagaatcctttccctgggtgggggtatacttaaaattattgcttttgtattctatggattaccttgaaataccctttgagtcatttctcaaaaattgtgcatatcataccgatctgataactcattgcactgttgatctgaggcttcatcccctcacctaaccacatggtcatccattttgcagtccacaagagcccttcctggattcatggaaagaacttgctctcacttgggcttgagaaagcataagtcaacttggcagggcatgtgttaacaagatgatttagaactttgcgaccagccagaaccataaagacagcttgtaataaaagtaaagctgttctcatgagatgcccatgatgagggcttctagggcaaggctgctgtttcttgctacctcagcaagaatgaggtctctttcccatgatcatttccctccccttcactgggcagggtgacaaagaccaggcctctgctcccaccagtcaacaacaggcagggctcccagcatgccgaaaccttgagagctacctcttcctcctttatcccttcttcagagggtagcctacctgtccacaccggcagagagtcactctgcatgtcagtcctctttcggttgcctcttttgtcaaaaacgtcacctactttcactgcctgggacacagctcagaacctgactcaaatatttgttgaatggccaacggaatgaatgaattgccctctctcctctaccttcaactggtagctcccccttcattcccagagcatcctatacgctttacctataactcatatcccacttgttattagttgttcaatgtctggtttttgtccactaaaatgtaagttttgactgtttctattttattcattattctatttctagcacccagcaatgtgtaagttaccaataaatattgattgaataaatatactctcaggttccttaccttgaagtcacaaaactattgatgcctatgcaaggtgacttgtaagcatacctaatacacaaatatagctgcctcaaggaaacgttttcagtctagctaggtcctgcttatgtcagatttctcagttcagtatttctgtatcaagcctcctaggtttagcccctttctatctgatccatcttctttgctagcaataaagtcaattacgctcttctcagttgtctaattcaccttgctaattctaccctcctaagctagaactaggttaatgaggaaacagtttccggatgtgtttctatttcccactatttttctgtttaagggaaaatttcaactaattttctacttgggtgtaagcatttccagctctctaggagcaaagtctctatcagtctggtttttcttttccaactgtggtttgttctgaattcctcccttctcaataatttatttcttctctcttttaacactctgtgttcttcttctcttgaacaccattatttagctaagtgttgctgttcttcaacaaccaccatcctctaaaactcctctgtccctgctcacttcattcataacacacaaattcaaattcctagccagctcacgcatacatgcataaactcacttatggaaggacattacaagagactccttacctctaggttaggaggagctttacttatcaactgaatacagtaggagctttacttgtcaactgaacactgagtaagtttgagaattgaaaatgagacctgagcatcacaaaacaacctttcatatctagatatagttaccatctaggagttcacgtgcattataaaagaaatggtcttgtttaagatgaaaccctgcaagctctgtgagggcagggattatgtctgtttatcacaccatggtatgttcagttcctaagagtgtcgggtatatagaggccgtcaatatttgttgaaattaaatgaaaagtttcagtcttttcatgcttcacaagaagaaaatcttttggagaaagccaatgatttaacataatcttctggatcttctatgacagaaaatagctatttaatccgtaaaaaatataaacatatggagccaaatactgccttgtgccaatcaaatgtttggtttattaatagttactaaatttattagtgctctctagaaaagagcctttttagaatttgatttcattttaggcagcattcgagaagcactgtcgactcagctttcctctggctgttgtctttttgtaccactccctaaccaaaattgatgcaaaggcaggatgctttgagttactctcagtaatcacatattattgaagtcagctggttattcttgacagacaatatgatccaaaataacacaatgtttaaacagaaggaacatgggtgtggacccccattgctccctcttcagagatgtctgccagggtccagggaacttgggatctacctgaagagtgttactaagggaacaatgtagccttttcatgaccttctatagctttagtttaaaaaaggaacattatcatcatttgctaacattacaatcaacagcagatctgataactcattttaagtgatatattgtatttaaattacagtataatccctaatagctttttgccagcagagtctttcaggattcaaaatgcaaattgcacctgaaaaagaaaaattatttttagacttatggcactttaacttaactgtaacacagttagaatactttttattattattattattaatagaatatgtttcggttgcgaattctggaggaatccctactggaaaataattgccagtcctcccttggctgtgagccattcattgaaatggactatgagataagactgaagaatttcactaatttcgggagtgccaactgaagtttattattgtgaatccattagacatgagatttctgtgattatctcaatgagttctaaaatccaggtccaaatgaggtggaaaaattttatatgactatatacatgttatagagcaattaatattttaattgggtgtcaagaaaagcagtggttgctctataacttaatttgggttcctctgcctctctgtagagtttctgaaaatttttaaatgtcatttggagttaaggcagaatgatactgtggaaaaagcatcagcttaaaattagacctaggctcagctttagttgaattccttaaatttacattggtgacgttgagtttgtaaccaccccatacctagattttcttaaaataggagtaatatgtcctactttataaagcagttctaaggaagaaaaatgattagaacccaaggcagtttcacatagtataagatcccagacgctggccaccaggtttcttgagttcaaacccactgcattatcctttgccaactatgtgaacttgggcacaaatcacttaccgtcaatttctatatttggaaaatggggacacaaatatagttaccatacaaggttaaaagaaaacaaacattaaagaaagcatttaaaaaacagccatcatgaagttggcacttggcgtttgacatatgtcaagtgttggcttctattgttattattattattacatttaagcgtctttggctaaacctaaatgaaaatcctataatttacattgtatatttaaatctgatagtgaatttatctgatagcaaatggattctaggttgattattcatatgcttgtgcctacgtgtgtgtatgcatatttgttgtatgtataagacctatggatttaagataaattagtcacatgtatatatgaaatatagttataaactaattactccccaaactagaacagcaaaaataggtctccttacttaagagtacagctgtacagagtaaattcactatgcttggaaacttctttcatatctatttgtgtaagtctgcagctagtttctgaacagttgtatagtgatggtttcatggtactcaccaattagacaagtataagtcatgaccttggctttcttggaacgtaaccagtggttgacagggagtgtttgagttaaatgataaactagcagtccagtttacactcagcatctggtatcccccactctccatctttcttcaaccaaggcatcacaaaagcaatttgggggcaggcattttcatttaaaaatggagagtggattgtggaagcatcctgagtgtttgtaatgaaagccatttggtttttattagcattagagtctacgtgcttgctagttttcagtcattttctcttcaaaaatggttccccagattccagttttcacattgctgccttttgaattgaatcctttgtgacccgttgtgattacattgcattttccttgtgttcttttaaaaagttctgactttctctgaattgtggttggggggatggtgggaggagggtggcagcaagggaatagggtcacttgtacttttagaatgttgtcaaaagagatttttaaattgtcaaaaattgcctagaagtaatatcaagcttagtgtctgctaataaagcaaggatttacaacagaaggttcggtcagaaatgggtgtcctaaggtctttacaaaagagcatttgctcctgggttccccaacatttctctgacctctgttggacaattctagaacagttataaatcaggctaattataatgatgttaggatactggtgttgtgtgtttggggttaggaagctgagagcttaggcaatttgaagacaacaagctgaaaacagctttgttcatataccattccctaaacattaattcagtgcagattaagaatagtcaatggagggaccgggcgtggtggctcatgcctataatcccagcactttgggagactgaggcgggtggatcacgaggtcaggagtttgagaccagcctggccaacatggtgaaaccccgtctctactaaaatacaaaaattagcctggcgtggcagtgggtgcctgtaatcccagctacttgggaggctgaggcaggagaattgcttgaacctgggaggtggaggttgcagtgagccgagatcgtgccattgcactccagcctaggcaacagaatgagactctgtctcaaaaaaaaaaaaaaaaaaggaatagtcaacggaggaattttgtcatggcactgggggtatatatgtggtatgtatgttgtaaatagatgcctaacctatttaaaacgtggctaatttatagtgaccaagagtttttaaaatagagtagtaattgagaaagaaatggtttgtatctttttcccacttaattttctttcctgttttgtacatttttctagatgcttcaaaaagacccaaagaaaagaggaatataagcacagtcattactcattatttgtggattctctgtttgctaattcacctactccctaaaatgtatttattacccccaaatcactatttgcagctctctcacagtcatttacagacatgcacagactggtgaaaaaactttgagtctttctacacacatgtactcagctgagattgaacaagggaactatagacaaggatcctttttgtagtccatttagtcaacgttttttgcatttttgtgctttttaatgatgatttcactgttaaaatgctccacaaccatagtgtggaagtgctatgtagtgttttgaagcacaagaaggctgtgatatgccttacagagaaaatatgagcaatggataaacatcgttcaggcatcagttatagtgctgttggtgtgagttaaatgttagtgcatcaacaaaatatattaaataaggtgtctttaaacagaaacacacataaaacaaggctatgtattaatcatctgtgtgtccagaagcccacaggaacctaaccttgtatttcccctagggtcaatgattcagtattcactaattcagtgtagtagggactttatatagaacaaaactcatataaataactagaataaaccacacttgttttttaattcctgtgaaataattcatatgggaaaccatcaaagacctgctaagtaatgatgaacattaaaaaaattaaactgggccgggtgtggtggctcttgcctgtaatcccagcactttgggaggccgaggcgggtggattacctgaggtcaggagttcgagatcagcctggccaacatggggaaaccccgtctctactgaaaacacaaaaattagccaagcatggtggcgggtgcctgtaatcccagctacttgggaggctgaggcaggagaatcgcttgaacccgggaggcagaggttgcagtgagcagatatcgcgccattgcactgcagcctgggggacaagagtgagacttcatctcaaaaaaaaaaaaaacaaattaaacccatataatagtactacagcacaaaactttatgctatctattttgttcatttgctgtttgtgactatcatatttatgtcaactttaccctgttttattgacaagtacccaggagcacttgaaaatgtagaaattcctttaaaccctcccccctccaccagaaaacaagcctccagggaatgcacatatataaatattaagatagttgttgtgtatagtgcccaaaatcctattttcagttagcaaactattggtaatgttggaaagcaaggcatccagataagaaaggggagatcttgtggcttggaggccattcaaaggcagacttaaggttgcgtcttcttaagggagacatgtagtgggggtcccgtgtaactggaatttcaccatgtctaatcgtgtctagcagaccaatggaatgctgtgcctcaagtttcttctgagaggcctatgagcctcatgagatatcaacaaaaatgtttcttggccatcagaagagagaagtgattttgaatatagtatagtttttgctattataatcactccaaaaccaggcctgttggtgcttgtggttcttgagagaggaggccatggggggtgaaattcaagagacctgtttacctataggcacaagagccctcctcaagacttgagacaatgaaagatgaggaagggaggtattttccctgcatcatccagcttcagcacccagcgggaactggatcatgggtggtgtctgggtaggaggctgtggaggctaaagtcagtggagcagagtggaagccttggggtcgtgggcttatgcatgagacacatgtgaggttccgtgcaacactttaccagccaattataagggactgaagtcactgcaaaacataggttgccatgatgtaagcccatttgcatttgcagactgaaaaggcaaaaggaaatattcctgattcaagtaagtatgggactatacttttttgatattggatctgttggtcctcatttctatgtttctcgattgtctaatgtggtggttccccctgactgcacattagacccactctagaaaaccttaaaaaaatgtctggaccccctccaaagattctgactgaattgatcaggagtagaattctgggcatccgtgtgtctaaaaggcttctcagatgattcacatgtttagccagggttgacaagtactgtcctaaaacatatttctgagatttttcacactccattttccaatgtgctccaaagatagcttaggcaggaaccctgctacatggccacttcaaaaagatgcacccctgcatgggcctttgagtgcatccacctagcgtggcctccatgccacttccctgtctggttactccactataaaaaattcatccgcggactctccaagtcctcaagctgtacattgtcctgcctttgtcccaacaagaattgttggtgataagtccgacagtggagaggctgtggctgcagagtggcaggaaagagagtaagtaaaggagaagacaggacaaaggaagagtaaaagggtacttgaaaaggactggaaaggagggccctgcaaggtgctgcttctcacgtgctccccaccagccttctgcattcaaagcagggagggaagagtgtgggctcagagccatacatgcttaagtgcaagccttggggccccataatttactagctgcttgatcttggaaaaattacttaatcttgtacagctaaaaagtggtggagctctgggattcagaactggtctgtctgggttaaaagagcccaaacgtttttcccagcgtatactacatctcccaatccatacacacacaatagacttttcagtgaggaatacagtaattaataacttcccagatggtagttgaacttgcttttaaattcctatagtcaaataagttgggagaatgttacaagaagattagttagaaagaaaatggtgtcatttattatcagctcgaaacattcagaattgtcatttgtaagaaataagctcattattaatagaagattacttctcttgtctttgtgtgaccattttcttaaattaaaaataacttttttcccttactgcaaaagtaatgcatgttcatctaatacaaattggaaaataaaggtaagcaaataatacaaaattaaacacactcttaatccctccgcccagatctaactgctgtaaatatgttagtatatatccttctagattttctgtgcttttatacagattttaaaaaatcatagtatatgctctttcactttacaatatctggtcaacaacattccatgtcaatacatttgcctttactacattattttttatatctgcttattaaggtgaacaatttagtctgattttaaaccacatttgtttactcagatgtcagagatccacagataaggaaacatctgaagagcccaggtgtggctatgtggagaggttgagtaattcaaaacaaagtacaaaacataaaaacaattacgaccagtttgacagttgtacgtctgtttcctacggccttctacccacaagtctaccgctgacttcaaagaaaagtcagcacagaggaggtccagaggataaggtgcaaaacgagaatcaaacccacgataagagattaaaggaaggttgatcaaagacccagcataaaagtgctagcccgtgacttgccttggcccatggccccaaaatattcatcagaacagagagcgctctttgaagtgattggatgcatccatgctcagacaagctcggtggtcaaagggaaattttaaagagtggccctggaaggagttagcaaagttgcctcttcctctctctgctctgcacatccctcacaaactgaatgttatttctttggtttgttgtgcagatgcaagtaatttaactgtactttttgccccctgggagatgtgggaagtacagttgcttttacaggatggagaatttgcactcatgatcagagaactgaaacttccagccatcctttttattcagagtgtttaaggaccggtggtatttccaaataggcagtagggcttgttcatgctctgcttgttcattctgcttgttcattaattgttcactacttttctgagtagagttcattgctctgtgatgtcgtgacagaagctttcatttccccagaaagaggaagaaaacagaagtgccccctccaaatggcatagccttcacaacattcagtttaaatgtttttaagtatcttaaaagagaagagttatatattgctaagtgtgttcttagaatgtctgtagttagcacttctttcaggctctagttttctggtttttcactttacataataatcctctatgtatttaggatctttatttttcacctttcccgttaccatatttttatttccttcaaaattcgagggaattgctttttctctctaccttttttagatcagtttcctagtctttaactgaggtgttaaagttggagtttttactggcaagtcttgactgagcacagtgttaggctctgtgagagagaatatgcattttctattttcacagagccacagtccaggtgaggagataatgaatttgcatgcgaaaaatgaatatgttgtgagctgatacagacttttgtcaggccagtctttcataaagaagtatttggaatgggctttgaaaatgcctgaaattccaaaatgaaataatatgaaataatatttattagtacgtataggggctgggtaacatgctcaaagttacagaggcagaaaaccataaggtgtctcacagaaactgaatatactcatttaactgtgacagatggctcatgcgagaaagtagcaaaggagaagcttcattcgttctattagtgttagaatgtgctatggaatctggattttattatgattgcaaaaggatggtattgaaaactttggagtggaaaatgacattctgaagtattttgagaatatgaatctgcctgtggagtacagaatggacataggtaagaagaggcctggggccacaactttgtcaaaagggcacaaatagagtctgagagaaagagggtttgagacagaatggaaacaatgggaaagatggaatggactctggaggcaatgaactgagaacggatctgacctctgtggcaaggggagaggaggtgagtgatgggctgtaagagaaggtggtaagaagactcatagatgattcagtcacacataaccataattgcacccctgttacctaggtgctaggtgatacaaagagattaatcacatcaacaaaatggttaggtagacagagtaggtatttacaatgaaaaactcaaagtagtctcacattgaagacagagtgaggcaatgagctctcaggagtcaagagaaatattccttgaagtttggagtcacagaagcatcagggaagagatggaacatgagctgaatgttgaatgatgggtagaatttggaaagaatgacaggggcaatcaaagctgtgggatgaggaggttaaagcaaagacacaggactaagaaaacacaaggagtgtttgtgacacattgacgagggccatctggttggaacagagtttgcataaaccaccaaaagaggaaaaggggaaggtagggtgatacgtttattctggtaaaggtttagacaccaagctaaagattttatttttatttctgagatagtctctctctgtcacccaggctggagtgcagtggcgctgtcttggttcactgcaacctccacctcccgagttcaagctattctcctgctttagcctcctgagtagctgggactacaggtgcctgccaccatgggcagctaatttttgtatttttagtagagttggtgtttcatcatgttggccaggctggtattggactcccaaagtgctggaattacaggcgtgagccactgtgccctgccaagcttttataatttaacctgggaaatgtcaagccactgacatttttcagcaaggttgtggccagtgtcaaagagtctttcgggaagtttggtttgtggaagatgtgtagaatatatcaagatgaagaactgggtgacttctagtcaaaaaggaatgatgatataaaccaggtaccaatcagaatgagaggtatggaagaggggcaaaggaattaccagtaaaccaaggggaaatagaaatacagttttacccaaagtttcaaatccaggaggctatgatagcaactgtgctgtatactaaggcatacaactcatgagatgactggtttggtaacagtcctgagcgttttgttttaaagagctgggtcctgaggttccagacaagcaaacatgccaaaaaagtggttcaatgggggggcttgaggctcagctggaaaccatgtttaccataccaagtttaaaaaatccacacagctcagcaattgtttgaagtttttaattaattaattaattcataaagtgaagtattttcaaaagctcatctgagagcttatattctcttgatacagatgaattctcaattgctcttttgttttcattgcaaaacagttcaacttgtatgagactcaaagtggggagggcaggagcagaattttctctgttccgggtatagacattatgggtattgggccatattctcctcttcgttggtaataattcctattttatacatctttctatcaattgcagctcctaccagagtcaacgtcttgattgtaaatactcagtgttggttgatttgcattttcatcatagtcctgaaagataaaagtggacctaagaaaaactaataagcttacagccagttttataatgacagactctatataaacaaatgcaaattggatgtcaaatttgaattacaaaatttatttgagcaaggtccaggaagtaataacagtgtcttcagatcttttctaaaatgataaaaattcattaacaatcttccatggcttggagtctcagagactttcaaaagtcacagcactttgaagagcagagttggcaactaaagttatcagagtgaagaatggcatgctaacctcaggtgcaggatggccaactcaaagtagacctctattctttgttcttctgagataggaactagccagaaacttagttattcaggggtggggtgggaaggctgtgggacccagggtggaaggacccacacagttcaaaataaaacgaaccaactatagtgaaggaaaagagaactatacacagatagtattcctcatccccctgaattgacttatataaaaaagaaaacggagcatccgacaaattgatgcaatcaaaagggagcaataagcctttttctccttttaagcctcttaagaaataaacccatcattttatctagtgttttctctgctcttgcagctgctcgactgatccaaaacatggatgccaccactgagccttgtacagactttttcaaatatgcttgcggaggctggttgaaacgtaatgtcattcccgagaccagctcccgttacggcaactttgacattttaagagatgaactagaagtcgttttgaaaggttagtagagattgtgtctgtgcatcaaagatttctctcttaatatgttcattttttaaatatacaattgttagccattacaaggaatgtcacagaagattaaaaagttaataatccttccaggatttgtgtaccaccaccaagtcactctgatagtggcagacactgaaattaatgtgttgacatctcttagcattcctgctttcatttgtaggtatgcaaataataaagcggtatcatctctagagatggcaggtttggttttttgtttgtttgtttgtttgttttttgagatggagttttgctcttgtcacccaggctggagtgcaatggtgctatctcggctcactgcaacttctgcctcccagatttaagcaattctcctgcctcagcctcccaagtagctgggattgtaggcacctgccattacacccagctaatttttgtatttttagtagggacggggtttcaccatgttggccaagctggtcttgaactgacctcaggtgatccaccagccttggcctcccaaagtgctgggattacaggtgtgagccactatgcccagccaagatggtagttttatgccattttacagaagaaaaaaaattaaatgattggcacagaaacctacttctgtagtctccctacccaaaccctgtgttaaagttactgtaagatgttactaagatttgccttcccagcacaggtatattctaacctggctaagactgtctccctgagaagttaagaaatctagccaagtccctcctatcctttgttctctgttctcccctcttctagaagttattttgtagaagaacaatttttgctactttttaacattgaaacaagtaggacaattcaattcattcatttggagcatgaacggtacagtcacacaaagataattattttccagccatcaaaaagactattcatactaaattccaaattcctctgtgttattgtttttttttaatctcaatttcaagaaaagtaactgttacctatggcagagccgtatgcatcactgttcataaaaaaaaaaaaaagataatctagtcaaaaggactttcatctaaattggctgattaaactgactcccagttctgtgctaggaatgataatctggtaaggggtttggtttttcctataatgttttggaactggggggaggaaatgaatgtacctccagaaaagcaaggtttttttttaactgaacccactttgcaaatgttaattactgcaaatgagcaattatgtttgcatagtgcaaatgagcaattatgttgatgcattttattaaatgtcctatttcagatgtccttcaagaacccaaaactgaagatatagtagcagtgcagaaagcaaaagcattgtacaggtcttgtataaatgaatgtaagtgctcttcatttgatttcattaggagtatatatatatatatattggtgccaaactatgcctagatttctaattgaatttatgtttgttgtttccaaaagctgctattgatagcagaggtggagaacctctactcaaactgttaccagacatatatgggtggccagtagcaacagaaaactgggagcaaaaatatggtaaggcaattttcctactaaaaaagaaatttccatgtaaaatctatgttataatatcattagtgaactaaagcttctaaagatatattttatcttttattgctttaggtgcttcttggacagctgaaaaagctattgcacaactgaattctaaatatgggaaaaaagtccttattaatttgtttgttggcactgatgataagaattctgtgaatcatgtaattcatgtaagtttgtgtgtcaaataactaaagttacctttaaattgtaataaaacttccacatacattgttgttattgatatttagaaataatgctattttcaattgaattgaataagcaaggaggtagtatatccatgctctgtccctaatacctggagttccaattttgaaagtattttcttaatgctgttttcgacattcaccccttgcttctgctacctctgttttagatacctctcccttcacaaaacaaatgataagaagggctccaggcccctcctattcagaaaaagttcctaatttctttgtatagtacttgaaaggagcatgctttcgtttatagaagtaatgcaggtctagaaaccaaaaaataataattgctttcaaaaagaacacagaaaagggattttaaacatcatttttttcctcactaaagagtatctgtacttttttctcaactaaaggtaaataaaatgcctttcttttaaaatggatttattgtatttttacaaatgtaaacaatttgatttaggtgtcacctaagactagattaatgactatgtttggaatgtactgaaaaatataaagagtttttctttcttcctttttttttttgtttttttttttttttggtttcctgtgtaagaaattatacaaaaaattgcaggctactgaatcacctaatcatatctgtgtcactattgcataaatctttatggtcgtttttgttaaaatcatgaaaggaattgaacccaaatctcctgcagtgggctctctctcttctgaaactttctccttgcaggatcaccttgaggaccagggggtggggaaggatcagggcccttcatgtggagatatcttctggctctttccataccagttctttgggttatgttttcttttctattggcctaggctctccacagctgctaggattctctctttaacccagaaatgctctgtttggcctccacactcatgttgccatgcagtgagtaggaaacaatcttgcaaagctgcagtatgcccagatagctcccacttgggtattaaacatggaccagacacgttagcgcaaaactgagtttcctctttcacacccttaactgctatctgggtctactgaggttcttctgagcagagcagctttgaggagaaccaaggagaagtcgcctccattcccttagggtagagaatcttaaaaaacattttctggcacaagttacattagctaaaagattctggagttaccttagaggttttccacttctccccttctccccatccatccaaatcaacttgaagaatattaacccactcccaccaatgaaaggggatcccaactaagggtggaagcagatgagaatgttcccaggggagcacattagaatctcaggaagctgagaaatctgtgaatatgtaatttagaaatttccacgtcctagaatctaacatgtttttgttcacttgcaccttctgctctgcattaaaaatccctcctagtaaatcttttgttcactttcttttgttttccttaaatatctgcagcacagtcctccagattatctaactgcccgttagtataacacttacaagtagtgtagaaagcatttcctaactaggtatttattgagtgtctgatggtcaccccataaacagcaagagtaggatctttcacatacatagatagacatgcttgtatttttcaaacttttctatattcactgaatgatttattttcttttatgtatattttttatagattgaccaacctcgacttggcctcccttctagagattactatgaatgcactggaatctataaagaggtaaaaagaaaaaaaataatcaaaaccaaactacaaaatgatctggtgtaaacctacaagtaatgaaaaagataaagccaaattaaatttagccctctgatgtttttcattcatgacagggacttaaaatcacacataatagtgagctgtctttgatagaatgaacattctcaatagaatgaatgaaggtattttacaaaactaggaaacttgaaattccttatttgtatcttggtttttagtatttaaaacatatgatcgattttgaaaagttaatttaaaatattttaatccacctgtaaactgcattatttaaaaaatgaaaagatttatcatggtctagggtggtgctggtgaggaccagagggtcagtgagagatacactctgcagcatccttctggaaccatctgatttgactgtcagagaactatgcaggtagtgacattgggctcagacaaacttttgcagctaccttgtgactctaacattggccaggtagccagtgggcatcatatcccatagtggacgtttggatgttctggagtgctttcttattgtctcacaaccttgcctcccttgggctgatgttcacgtgctctttttttttttttttttttattatactttaagttttagggtacatgtgcacattgtgcaggttagttacatatgtatacatgtgccatgctggtgcgctgcacccactaactcgtcatctagcattaggtatatctcccaatgctatccctcccccctccccccaccccaccacagtccccagagtgtgatattccccttcctgtgtccatgtgatctcattgttcaattcccacctatgagtgagaatatgcggtgtttggttttttgttcttgcgatagtttactgagaatgatttccaatttcatccatgtccctacaaaggacatgaactcatcattttttatggctgcatagtattccatggtgtatatgtgccacattttcttaatccagtctatcattgttggacatttgggttggttccaagtctttgctattgtgaataatgccgcaataaacatacatgtgcatgtgtctttatagcagcatgatttatagtcatttgggtatatacccagtaatgggatggctgggtcaaatggtatttctagttctagatccctgaggaatcgccacactgacttccacaatggatgaactagtttacagtcccaccaacagtgtaaaagtgttcctatttctccacatcctctccagcacctgttgtttcctgactttttaatgattgccattctaactggtgtgagatggtatctcattgtggttttgatttgcatttctctgatggccagtgatgatgagcattttttcatgtgttttttggctgcataaatgtcttcttttgagaagtgtctgttcatgtccttcgcccactttttgatggggttgtttgtttttttcttgtaaatttgtttaagttcattgtagattctggatattagccctttgtcagatgagtaggttgcgaaaattttctcccattttgtaagttgcctgttcactctgatggtagtttcttttgctgtgcagaagctctttagtttaattagatcccatttgtcaattttggcttttgttgccattgcttttggtgttttggacatgaagtccttgcccatgcctatgtcctgaatggtcatgcctaggttttcttctagggtttttatggttttaggtctaacgtttaaatctttaatccatcttgaattgatttttgtataaggtgtaaagaagggatccagtttcagcttcctacatatggctagccagttttcccagcaccatttattaaatagggaatcctttccccattgcttgtttttctcaggtttgtcaaagatcagatagttgtaggtatgcggcattatttctgagggctctgttctgttccattgatctatatctctgttttggtaccagtaccatgctgttttggttactgtagccttgtagtatagtttgaagtcaggtagtgtgatgcctccagctttgttcttttggcttaggattgacttggcaatgcgggctcttttttggttccatatgaactttaaagtagttttttccaattctgtgaagaaagtcattggtagcttgatggggatggcattgaatctgtaaattaccttgggcagtatggccattttcacgatattgattcttcctacccatgagcatgaaatgttcttccatttgtttgtatcctcttttatttccttgagcagtggtttgtagttctccttgaagaggtccttcacatcccttgtaagttggattcctaggtattttattctctttgaagcaattgtgaatgggagttcactcatgatttggctctctgtttgtctgttattggtgtataagaatgcttgtgatttttgtacattgattttgtatcctgagactttgctgaagttgcttatcagcttaaggagattttgggctgagacaatggggttttctagatatacaatcatgtcttctgcaaacagggacaatttgacttcctcttttcctaattggataccctttatttccttctcttgcctaattgccctggccagaacttccaacactatgttgaataggagtggtgagagaggacatccctgtcttgtgccagttttcaaagggaatgcttccagtttttgcccattcagtatgatattggctgtgggtttgtcatagatagctcttattattttgaaatacgtcccatcaatacctaatttcttgagagtttttagcatgaagggttgttgaattttgtcaaaggccttttctgcatctattgagataatcatgtggtttttgtctttggctctgtttatatgctggattacatttattgatttgcgtatattgaaccagccttgcatcccagggatgaagcccacttgatcatggtggataagctttttgatgtgctgctggattcggtttgccagtattttattgaggatttttgcatcaatgttcatcaaggatattggtctaaaattctcttttttggttgtgtctctgcccagctttggtatcagaatgatgctggcctcataaaatgagttagggaggattccctctttttctattgattggaatagtttcagaaggaatggtaccagttcttccttgtacctctggtagaattcggctgtgaatccatctggtcctggactctttttggttggtaaactattgattattgccacaatttcagctcctgttattggtctattcagagattcaacttcttcctggtttagtcttgggagagtgtatgtgtcgaggaatttatccatttcttctagattttctagtttatttgcgtagaggtgtttatagtattctctgatggtagtttgtatttctgtaggatcggtggtgatatcccctttatcattttttattgtgtctatttgattcttctctctttttttctttattagtcttactagcggtctatcaattttgttgatcctttcaaaaaaccagctcctggattcattaattttttgaagggttttttgtgtctctatttccttcagttctgctctgattttagttatttcttgccttctgctagcttttgaatgtgtttgctcttgcttttctagttcttttaattgtgatgttagggtgtcaattttggatctttcctgctttctcttgtgggcatttagtgctataaatttccctctacacactgctttgaatgcatcccagagattctggtatgttgtgtctttgttctcgttggtttcaaagaacatctttatttctgccttcatttcgttatgtacccagtagtcattcaggagcaggttgttcagtttccatgtagttgagcggctttgagtgagattcttaatcctgagttctagtttgattgcactgtggtctgagagatagttttttataatttctgttcttttacatttgctgaggagagctttacttccaactatgtggtcaattttggaataggtgtggtgtggtgctgaaaaaaatgtatattctgttgatttggggtggagagttctgtagatgtctattaggtccgcttggtgcagagctgagttcaattcctgggtatccttgttgactttctgtctcgttgatgtgtctaatgttgacagtggggtgttaaagtctcccattattaatgcgtgggagtctaagtctctttgtaggtcactcaggacttgctttatgaatctgggtgctcctgtattgggtgcatatatatttaggatagttagctcttcttgttgaattgatccctttaccattatgtaatggccttctttgtctcttttgatctttgttggtttaaagtctgttttatcagagactaggattgcaacccctgcctttttttgttttccatttgcttggtagatcttcctccatccttttattttgagcctatgtgtgtctctgcatgtgagatgggtttcctgaatacagcacactgatgggtcttgactgtttatccaatttgccagtctgtgtcttttaattggagcatttagtccatttacatttaaagttaatattgttatgtgtgaatttgatcctgtcattatgatgttagctggtgattttgctcgttagttgatgcagtttcttcctagtctcgatggtctttacattttggcatgattttgcagcggctggtaccggttgttcctttccatgtttagcacttccttcaggagctcttttagggcaggcctggtggtgacaaaatctctcagcatttgcttgtctgtaaagtattttatttctccttcacttatgaagcttagtttggctggatatgaaattctgggttgaaaattcttttctttaagaatgttgaatactggcccccactctcttctggcttgtagggtttctgccgagagatccgttgttagtctgatgggcttccctttgagggtaacccgacctttctctctagctgcccttaacattttttccttcatttcaactttggtgaatctgacaattatgtgtcttggagttgctcttctcgaggagtatctttgtggcgttctctgtatttcctgaatctgaacgttggcctgccttgctagattggggaagttctcctggataatatcctgcagagtgttttccaacttggttccattctccccatcactttcaggtataccaatcagacgtagatttggtgttttcacatagtcccatatttcttggaggctttgctcatttctttttattcgtttttctctaaacttcccttctcgcttcatttcattcatttcatcttccattgctgataccctttcttccagttgatcgcatcagctcctgaggcttctgcattcttcacgtagttctcaagccttggttttcagctccatcagctcctttaagcacttctctgtattggttattctagttatacattcttctaaatttttttgaaagttttcaacttctttgcctttggtttgaatgtcctcctgtagctcagagtaatttgatcgtctgaagccttcttctctcagctcgtcaaagtcattctccatccagctttgttccgttgctggtgaggaactgcgttcctttggaggaggagagacgctctgcgttttagagtttccagtttttctgttctgttttttccccatctttgtgcttttatctacttttggtctttgatgatgatgatgtacagatgggtttttggtgtggatgtcctttctgtttgttagttttccttctaacagacaggaccctcagctgcaggtctgttggaataccctgccgtgtgaggtgtcagtgtgcccctgctggggggtgcctcccagttaggctgctcgggggtcaggggtcagggacccacttgaggaggcagtctgccggttctcagatctccagctgtgtgctgggagaaccactgctctcttcaaagctgtcagacagggacatttaagtctgcagaggttactgctgtctttttgtttgtctgtgccctgcccccagaggtggagcctatagtggcaggcaggcctccttgagctgtggtggactccacccagttcgagcttccgggctgctttgtttacctaagcaagcctgggcaatggcaggcgcccctcccccagcctcgctgccgccttgcagtttgatctcagactgctgtgctagcaatcagcgagattccgtgggcgtaggaccctccgagccaggtgtgggatatagtctcgtggtgcgccgtttttaagccggtctgaaaagcgcaatattcgggtgggagtgacccgattttccaggtgcgtccgtcacccctttctttgacttggaaagggaactccctgaccccttgcgcttcccaggtgaggcaatgcctcgccctgcttcggctcacgcacggtgcgtgcacccactggcctgcgcccactgtctgggactccctagtgagatgaacccggtacctcagatggaaatgcggaaatcacccatcttctgcgttgctcacgctgggagctgtagactggagctgttcctattcggccaacttggctcctcctccttttttttttttttttttttttttttttgagacagagtcttgctctgtcctgtcacccaggctagagtgcagtggcgcaatcttgggtcactgcaacctccgcctccctggttcaagcaattctcccagcctcggcctcctgagtacctgggattacaggtgcccgccaccgcgcccagctaatttttgtatttttagtagagacggggtttcaccattttggccagtgtggtctcgaactcctgactttgtggtccacctgcctcggccccctaaagtgctgggattacagatgtgagccaccacacctggcccatgtgcttttcttacagaaagtaaggaacagcaggagacaaaactaataatcttacacgttattagatattggggaaaggtgttggttctacaaaggtttgtcttataattattttgtagctcaaaagtaagttatctttgatgatcctaatggctcacagtgtagtgatgtgactaaaattacattttagttaaaattactagctaaatatgtttatgattggcatttattttgccaaattatgaagttcgaataacatggaatgaattcactgtaaggtatctttttgaatgactacacaacactgaaatgaagaaaaagatatatcatcaaaggccacaattaatagcacagataaatacatgggtatgggatatttgagttcagtacaatctagttgctgtgtggggtacagctactggctttaagagcaatgcagctgctttctgttacagatttgaaagtgattgaggaattttggttcactattgtacatttttatcaccatgaactgggatgcttttcatatttaggattgtgttcttatatcaaatttttcaaatcctatgatacatattttttttacattttaattctgatatcaaggtatacctggcagtcgatgtatatatttaaggcagtaaaagctttttttttttcattgttaagatgttgcatttttgcattttatactcaatgctatcccataatctcaaacaggtcacaaactggcagtctttggcttgaatctgatatagaagcatttttgtttaacctgtagtgtttttttttaaattttgaattagttgtcaatatttttcaaaattgaaagatttcatttgagaatccagatttcttagtaagtcagtagaatttgagcccctagcttgcattcttatatggcagcaattgaccagagtggtgttgtggttgctccttttagaaagggcatttattggctgggcgcagtggctcatgcctgtaatctctgcactttgggaggccaaggcgggtggatcacctgaggtcgggagatcgagaccagcctgaccaccatggagaaaccccatctctactaaaaatacaaaattagccgggcgtggttctgcatgcctgtaatcccagctacttgggaacttgggaggctgaggcaggagaatcgcttgaacccaggagataaaggttgcagtgagccaagatcgtgccattggactccagcctgggcaacaagagcgaaactccatctcaaaaaaaaaaaaaaaaaagaaagggcatttgttctccaggtttgaacagttttgaacagtcctcatcaacatgattcatcgatttatattgacttatcggctcctgtaggcacttgattttgcatattagtctggtcttggctaagccacagcagtaaaaacacaaatacagtagctcaaacaagaaaaagtttacttctgtctgtcatgccagtctggaagtaggcaggccatccagatgaggcaggaagctctgctccatgggaatgtctgggagccggctttctttgattttttgctctaacatcaacctcctctggtgtttttcttagtctatttggtcaaagttggttcaccagtgccctattcacatgtcaggccacaggaagaagaaaagagagaaagtggtagacaaatagttaacctttatgtaaatggcgcagaacttgcatacattccgttgcttaaaacattgtcatgtggccacaactaaatataaaggaggcaggaaaatgtagtcttgagcagtggccatgtctgtgtcttgttaaaacttggttggcagagaggaaggtcgtatcatttaaaagatgaggagtacatataccaatgtcatttagcatactctgccacagtttacatccactgatctagggaatactgtatttgtgatcaaataacacagtggtgatcaaatctagaatcagtaatatgtttatagagtttatgagtgagaaatctgagtctcagaagtttgctgtcaacactcagcagaacagtagtatagtggcaaactttggtccttctctcttcttcattctactacattattacaatttcttaagagttggtacttcatactagtagagttctttgaatgagcaaatgatagaagaaactaacctgcactggcacttacagcccggaagttattctcagcttaattaggtgctcttcaacgatctgaatcagactagcaaacacgcagcatgcttgctgccttgctcctcttccataactatgtacttttggtgacatccttctttcctgctaacctgagatctcagaattcttcttaaggtagtgcttcaagctgtaagcaatctcctttcagtggaagggagttgcataaaaataaaagttacatgtcatcccagaaatgggtaattatctgaatatttctgcaccctctccctttttttaaatccattcttttgggcatgggggtgagagcgtgtgtagttacagtaagaattccaatgttacccttatttttcccatgatattttctactctctcctaatccctaccacctgcaatccctcagtttcccctgcatttctggcaaaattctagtttttccactactctgctatctttgaaagatgtcaaccaccttaagtatttctgtcttgtgtcttattgcttcatgaacaaaaaatggtgcgaagtgtagaataacaagtttaccttcagtagaggagttataaatctggaaggaatgttaatgtcagtgtatcattggccttcaatgattttctcccttataggcttttatatatgcttttccctttgcctagaacttgccccccacacacaccacctgcctacactctttcctctaatatagttttcctagcacccaggtttctgtatacttcttatttaatgtctttttttttctataaaactgtaaatgaagtggaagcaatgctgtgtctcattgccctttgctctttttctaatacctaccaaagtttctggcccttaaatactacagaatcagcaaatgaatgattgagggggaagatagcagggaagagaggaaacaaaagaaagaagaacccaatcttttggaagccctccttgtttccttcccttgattccgggaaacatgagctctagggcatcaatagctaatagcatacatttctttagcattttacaaactctgtgttctcttttctcttttcaatccccagttacttctttgctaaactcagtttgcctgaggtatatttatacaatcaatgggtatcatacatttgcagtttacattattttattggaaataatcaagagaagttttgagaattggcatagggtcaccaactttttttgtcaaagaaagatggtcttagaccagagaggtctggcttccttgcccgtcgctttagcctataattttaaaactttagtgtggggtctaccttctgcagatatgcctcagaggctgaggatcacagagggtcacattccctcttcagtcaaaagtactctaatcgtaggtctcctttatcagattattaactcagcctgtttccccaggtcttctttgatccttccttccaggatatccaggtcatccagaggtatcatctcccataatcttaaaaccaaacttcttatcgactatgaaaatagcccccacaattactaagaagatcatttcactttatagaagtcattttttttttgctttggataccctcataatggaatttttgtattgtaatatttgattattattataatctagaaagggaaagtgatagagaacagttgcatcatctcagaaaggggcccacattcaccgtgtctgctcttcctaacaaactgttctcaagatgttctcatcaaggagcttcttgtgctatatctttgttaaagagatggagcctgagttctgaggtattctgattatctgaagagattacttaatgacacaatgctatctcaaagaacagaagtagggagattcaagacaattctattccttacagaggtacaaatttctatgctaggaaaacaatacgaaagatacacatggcccataaacataaccattcccattcacaaaatttgtaagtgaaaccaaccagcaacctcatgtgagaatgttcttctatattgattcactgagagaaatgaggaccttaattttcttaagaaatcacccaccttcagaagagtctgaactctgtattgggggtgaattggaattggtctcaaagcttccctttctctaccttcttagcttttcaagagcaattgttatcttactttgttgtccttcataaggaaatctgaagattaggaatccaaaatatttgagcataattacataatagatatgtttatgctctgtactgatgtttgcctgagaaggagcaataagtgaggttagtggtttccaactctaaggactactttgtgtgtgccaattacagggctctgtgcagaaacacctcacatgtacacacacttcaaaagccactatgatttatttttacttgtgcatttatacatccacaaaacatttctttgagtagagcatttcaggtctaaaagaaaagtaagaaaaccactcaggctagagtttgagagcataaggaggcgggaaaggaactggagagtagaagctacagggtatactgctgcagggcatggctagggagaagaagccagagttataaagaagtgtagagccttcacaaaatctgaggttcataaaaatagagacattttagggatgaggatagaggacttggaacatgggcacaatggactgaagccagaaagcgatgacccagagtctgtgctcctagatcagaaaagccaggagaagtctccaaattatatgtacctgggaaagaacacaagctgagattggctatcctgtagatgagcaggtgcaagctggaactgggattaaacaagaggggattttctttgtccacctacccaatgtacaagctgagagaaactgttcaggacttgagctaagaatagaagttccgaggaaataggaagtgagagaaacttaatatatttacaatttaacttcatttttttttaattcaacagatcttcattgagcttatgctatgtgacagatacttttctaggcagtagacattccaaggaaacaaggtccttgttctcatggaactcatgttctaatgggaagagatagacaataaataaccaagtaaataatttaaggaaatgagacaaattgtgagtgttataaagaaaataaatcaaggtgatagaataataagtgactggggtaaggcatgggtgattcaatttggcttgctgaaaccatctctggctgttgtttgtagaatgtgttttaatggaagcagaaagatcagagaaggccacatggtaattcatgtgaaagataacgatggactcagatggcagcaagtcagatagagaaatctgagcagacctaagataatcttgtgtaggtggctctatcattatagggaaacagtttgtgtactttaaactgctcggccaatatgtgcctcagtgatacgtggcggagcttgtctcactgcataacacagctatgacatgataagacaggccctgcaagggaaactgctgacctcactttgtcctttctgggtaccaagtgactaatagtcagaaggtttcactcagttcagtaatctgtgtttaagaaaacaaaagggggcttttaaacatgagatttagtgaatatgacagagaatttttgagatcaactgaactcagtttgtaaaaagagctagattcagccccccaagcatggaataaaccttggaagttatgcaagaagttgtacaaatcttcaggttcttattgataacctgatgaaagccccaaacagtccctatgctggtccaagtttgggtcctcttaggtcccacgttcctcctgctctagcgtcctgctccactgggggctattttttatttccagtgcccagaaatggctgtgtgactatatgtttgcagtctgttggagggaagcaggtctctctgctaacaactgcacactagctgacatgctgcttaaattgagaaatgtttctaagcttttttggtaggaaataatctttcctgcttagtctccctctgtgttcccccagcaaacttcttgtgtagcattattaaatattccccaacatcagtggccaagaatgacacaattctgtgactcctcagtcacttcatgctccacattaagtggagtttcttcctagaatggggaaggcagaacattggtaagagctaggtgtctcagaatctttggaaataaaatccctgatccataggtagttggctcgctaggttacccagatatcaatctgacaggacagttttctgttcctccctgggtcttgattgtcattcattaggaatgaaattaaagtttgaaggacagtagtcaaatggcattcatttgctctcttcctctttggcaaatctaacaaacatcaggctttttccaggcaggaagagcctcatttctaaagagccaatttataaatatcattacctgattctgcaaaatgaagatagtcctaactagagtaactatccatggtgttgggtgttagtaaatatcatctcattggtagtgtgtgattttaaaacccacaaaactgctattatatggattttatctaactgtttaaaaccgatgatcacctttgaaactactgttacgagtactaggacttacaattttttttttaagaaaagctacataaatgttttggtggattcttcttcacgtaaacaatcattgatttgctatctcagagcttcaagaaatctaccttatgactgtcaaaaatgagagctgactctggcctctgttgtaataactaattgctctctcagtcacacacacacaaaattaaatttgggtttaaaaagtatcctggccaatctactttttaagtgttaaaatacatgttgatttgcctgacgtggtggctcatgcttgtattcccagcactttgggactcagaggtggtggatcacctggggtcaggagttcaagaccagcctgaccaacgtagtgaaaccccgtctctactaaatacaaaaaattagccgggcatggtggcacatgcctataatcccagctaaggcaggagaatcacttgaacccaggacgcggaggttgcagtgagccgagattgcaccattgcactccaccctgggcaacaagagcaaaccccgtctaaaaaaaaaaaaaaaaaaaaaaaatatatatatatatatatgtataaagtttcttcccaaatcatgacaattatcatcatttcacattttccatatctggaagtatcataataaagaaaattaaaaccttaaggtagaatcacatctcgtacaatggatttagcacggcagtaaccttaagttctgacaccagataaatttggaagtcaggaaagatagtcatgatactaagacatatgttttaatcagttacattggagtagttaccaggtaatggaattcattaaaagaagtggtatattccatgtagctatattaaatactcgagcatcccagaagctagtgatactatatgcttccagttttctgagaaacttgaccagtttagcagactagaagcatcatccaaagttcttgtgcttgccttatatcaaagttctatagtctttaaatacatcggtaaggataaagagactggagcagaatcagtttgctgagtcaacaaagtgcccaagatgattactgttattgttttctcacctcatcaacaaaaagcatcccatatatatatatgtatatacaccatatatatgtatatatacacaccatatatatacacacaccatatatatatatatatatatatataccatacatatatagtgtgtgtatatatatggtgtgtatatatacatatatatggtgtatatatatatgtgtatatatatggtgtgtatatatatatggtatatatatattttccaatatcaattttccaatatcaatctactgagatatatctcagtagattgatattggaaaattcgaactaccattttgtttatagtcagtagtaataccctgctaaaggtcgattgatttatatgctttgggaatacagttaattcaaaacactgcatgcttgtactttggaatagttggtcccatgaggtatgaactcagacatactcgtttacttcaaagtgaaacaaaaattctgattaccttaaatagaaaaaaattgagttgctgagaatatacgtaaaattgtcttttcatttctgttactttagtgattagagttttttaaaaatataatttcaagttttattttagattcagggggtacatgtgtagttttgttacatggatatattgcatggtactgaggtttagaatatgaatgaccccatcactgaggtagtgagcatagtacccaatagttagtgtttcaacccttgctccactctctccctccaccctctattaatcctcagcatctattattgccatctctatgtccttaaatgcccaacatttagctcctacttataaatgagaacatgtggtatttggttttctcttcctgcattaattcacttaggataatgacctccagctgcatccatgttgctgcaaaggacatgatttcattcttttttatggctgcatagtattccagggtgtatatgtaccacattttctttatccagtctaccattgatgattctctaggttgattctacgtttttgctattgtgagtagtgctgtgattaacaaatgagtgcataagtctttggtagaatgacttattttcttttgggtatatatccaataatgagatttctgggtcaaatggtagttctattttaagttctttgagaaatctccaaactgctttctgtagaggctaaactagtttgcattttcaccacagtgtataagtgttcccttttctctgtagcctcaccagcatctgttcatttttgacttttgataatagccattccaactggtgtgagatggtatttcatcgtggtttagatttatatatctctgatgattagctatgtttaatgttgtctcgtacatttgttgaccacttgtatgttttcttttgagaagtgtctgttcctgtcttttcctactttttaatggggctatttgttttttgcttgttgaattgtttaagtttcttgtagattctggatattagacttttcttggatgcctagtttgggaatgttttctcccattctgtaggttgtctgtttactatgttcatagtttcttttgctgtggcagaagctatttaatttaattaggtcccacttgtcaatatttgtttttgttgcaattccttttgaggacttagtgataaactctttcccaaggctggcatccagaaaggtatttcctattttgttctaggacacttagagtttgaagtcttacatttaaatctttaatccatcttgaggtaatttttgtgtatgatgaaagttaggggtcccattttattcttctgcatatgactagccagttaccctagcaccatttttgaatagggagtcctttccctgttgcttatttttgtcaactttgtcacagatcagatggctgtaggtgtgctgctttacttctgtgttctctatcctgttccattggtctgtgtgtctatttgtgtacccagaccatgctgttttgactactgcagcattatagtataatttgaagtcaggtaatgtgatgcctccagtcttgttcttgttgcttaggattactttggccatttgggctcttttttggttttatatgaattttagaattgttttttctaattctgtgaaaaatgacattggtagtttgataaaaagagtgttgaatctgtatattactttgggcagtatggccatttgatgatactgattcttccagtccataagcatgaaatatttttgtttgtttgcttcctctatgatttctttcagcaatgttttgtagttctccttgtagaaatatttcatctccttagtcagatatactcttagatatttatgtaatgtgtatgtgtgtgtgcctattgcaaatgagattgtgttcttgatttggctctcagcttgaacattattggtaaatagatatgccaccaatttttattcatggattttgtatcctgaaatttttgtgaagttgtttatgagttccaggagccctttggcagagtcttcaggattttctaggtatagaatcatatcattagtgaaaagagagagtttgacttcttttcctatttggatgccttctctttcgttcttttgcctgattgattgatctaggtaggacttccagtactgtgctgaataggagtggggagaatggacgtctttgtcgtgtttctgttctcaaggggaatgcttccacattttgcctatccagtatgatgttggctgtgggtttgttatggatagttcttattattttgaggtatgtttctgcaatgcctagtttactaagggtttttattatgaaaggacattgggttttattgagacttttcccacatctattgagatagcccaatggtatttgtttttaattctgttgatgtggtgaaattgattaggatcttaatgcagattcacagatgaaaaattgttctattgagtagcaaatccatggatagcaatcacagctagatagtcacagcattacagagtatccatgaaaagaactgtttacttagcatttagtaaaagtcatagaataccagtatataaacctctggacttacaaattgataataattttgtacatttttcttaagttcttgcttgatcgaatatttctattttcctattagttttaggtttgattaatggatcactgtaaattcagatgcacctttgcactcacagtgaatatatggatgttccttccacttctaattgttccataaggatgtaaaatattcttaaaactgtgaaaatgttaaagcacattatagcacactttatagcctttctttgtatttaccctgcaaacaagtctttgaagcatagaaatctcacctatccataatcacaattgactgctttactaaattttaaaatgaggtggaatcgtaatgtattttaattgctaataggtaataatggctaataaatagcaattggttcaaacctaacaaaagtgggactccatttcctagtgttcttgccactgtgaacttgaatgaggcatttatatattctgtaaaaggttagtaatacaactattctatagtttacttttgcaaattaagatgtatgtgaagataaaatataaataatttgagttatcagaagaaaactaatatctaaatctatggtatcgtatagtgaaattttacagtaacaggagctatttatggaattaactaaaacctacaggtgtgtgttggtggagctcctgacaacacagcttcataaaaaagaaactgcttgactcaaggagacagataaaaagaagtgtgattatattatatgagtttgtggtcatttttccatgaatagttgagaaaatgactatgaaaaagagatttggtaaagaaatgtattattatggctgagcatggtggctcacgcctgtaatcccagcactttgggaggccaaggcaggcggatcacaatgtcaggagtttcagaccagcctggccaacatagtgaaatcctgtctctactgaaaatacaaaaaattagctgggtgtggtggtgggcgcctgtactcccagctacttgggaggctgaggcatgagaattgcttgaaccatagagatgtaggttgcagtgagctaagacagcaccactgcactccagcccaggcgacagtgtgagactctgtctcaatgaaaagtaaaataaaataaaaaaagaaatgtattattattcagcgaaaaaattagtatatgttattgcttatcaagtgttttgcaactcattctaatcaaggcaaaataactttattgaaaattgaaaattacagtctccataaccaagtggttatacattacttagtactttcaaagtgatacctcattgctctcctttaagctcttattcaaagatatattgactgtctaagaatctgtgcaggtcatttctttaaatacttagaaaaggatttttattttactaaggttatctattaccaaaaattaatattgaaatgaaaataaattttaagtaccatgatgaatatttagagctactccaacagtttagtgctatttttttcttgcaggcttgtacagcatatgtggattttatgatttctgtggccagattgattcgtcaggaagaaagattgcccatcgatgaaaaccagcttgctttggaaatgaataaagttatggaattggaaaaagaaattgccaatgtaaaacacatttttttttctgatacactgaataatgtcaaccgctttttttctttcccctctctatcatactttaagagtaaaaggtacagcactttaaccaagtagtaaaaatgcatggcttggtaatagatcattgacttcaaaaggacctttgaaactaaagaattttatagtaaactgggttcctgacatttaaaagacacactaaattggacaaatattaaactagaaacacttaattgccttttataagtggattccatcagaattctaccatttacagtcaaactgttgttagatgcccttcagactcagagcaaatgcaaagctgttttagttttgatatgtatagaatattactttattttaaagtttaaagtgatcacagagattgtctctatttctttgctaagaagtattaacccctgaacatagccatgtggcaatgtgatactactgagttcaaattgtcaggctgctgagctgacggagggtaagacaataattttgcaacaaagcccaaggagtgtattcctgaatttcttctggctctagatcaacccttggagtctgagttggcactttcttccctgatgattctttgatagggcactgcagtctcaagtgagtgaactctgagtctaagcagcatccaggttactgattaaacccatcgtcagagtcagtctaggacccacagagttctctttgtcattgcaaacgacaacctgcatccctgactccctatctgcttgcccctgccatctaagctcatcagaatcttgaagagttaagatcatggagggcaattttagctttcctggggctacgtgaaaccaaaaatctcctatcagaaccagggtgttcttggagctgccactgaatgaatggcatttgaatgggttacatgtggttctgtgttggaaacagacttgctagaggagaaatgtttcctgctctgggtttttgccacttgcaccttcccagaccatgcgctcctttgaccagcatcagctctgtagtgttgtgtcttacctcagcattatgtgtctatattctcactcttgtattagattcttgtattagattggcatgaggccttagacgtctttgaatcatttatgcatctctaacaaaatccagcatagtattgcacaaaggacatgctcaataaataattgttttcagtaaatgaataggtaagtgacctaaaggggaaactggagccattgtcactgagaaataattccaattttaaacctttaccttttgtctcttctcacttaaaattgcttttactcatttcagccactagttggggagttgttattgcaatttttctttttaattcagtgaaagaaataaaattggatgctgctggtctggcaggataggagaacagtcacaaaggtccatgatgttgccattctcagataacttgcaaccaaattgtgctctgtactaggaagtttctctgttacttgcgataaattcttatagaaactcttgcacctttttttccttgctgaattttaactaggacaccgaatggtaatggtgaagatgggagagagagtatttaagagagaaattggagatgactatatcaaagaaagttaaaatatgaaacattcacagacacaactgaactggccattagccatagctcataaatattgcttatatggcttggcagttgtcaaaatatagacagattttttaaaaattttaaacttgaccccacagccaaatctcaataattcttactacttctactccaaaaatctcttacatttcactttttttgaaatgacaaaacaaattacaaaaacaagtacagaataggacttaaattatgttgtacctatcctatatttttaccctcatatgtagttatatttttctaaagaattcttaattctaaaataatgattaaaaattaaatccataggctacggctaaacctgaagatcgaaatgatccaatgcttctgtataacaagatgacattggcccagatccaaaataacttttcactagagatcaatgggaaggtaagtggtaagttttttgtgctctcttattgtgccgttttctaaattataacattgaaatactctttctaaaattcgtcaagtttttatttattgaagtaaatgggacttcaattccttttttttttttttttttttttttgagacagggtctcactctgttgcccaggctggagtacagtgacacaatcttggctcactgtaacgtccacctcccaggctcaagcgattctcctgcctcagcctcccaagtagctgggactacaggcatgcaccaccacacctggctaattcttgtatttttagtagagatgaggtttggccaatctggtctcgaacccctgagctcgagtgatctgccggccacagcctcccaaagtgttagccacaggtgtgagccaccactcttagctggtaaaattccttttaaggcagctatacaataatactagaaactcccataggaaggggtttgaaaaatactaaaactgaaaatctttctgagaggccattatgtagtcatcagacttggacagtcacacaataaaagcactagatttccttttaactccaaaaaaggataatttattcatagaacttcccgtgttctcatcaaggccatctacagaggtgttcagaacaataattcagaaataggacacaaataaaaagaaaagctctctcatagattccatttataaacagcagttgacttctttttccttacctagtatccaataatctctttttgtggctatgcatttattctcgtgtattagttgatgcacacagccaagagatgaagcaatatccatgggaaaacctacaaactaccacattcagcgatgacattctctttggcactaattctagttaacaaggacttttccaaaggcataaactattgagttagacatcttacatagaattttttaatataataagtgtttaataaatacgttttgaaagaatgacctaaaccaccaaaggaaatgaagaaaattgtatagcatagcaccctatactcagtaagtgatgtgtgcttgtgtctgtgtgtgtaaaatacaacctaagatattgatagtcttaaacattatcaattcccatttagaaagacaagatttcatcttttggcaactccgtacttagcttctgaagtataaacatggcatgcctgtagacccaatatcgataattgaaaagatgctgttttctttgacttcataacatcactgtaccactgctataacagtatattttcatctataataggatttccactgagatgtgttactgtgtttgaatgaattgtttattaatacccacttttaaaagctaaacactttacacacatttccatttttgcataaaccaaaaaagctttatttttaaatttaaatttaaattatatttttattttctgtattggttagacaaagaagatgacattaagcctaatttctaggtatatgttccttaagcttaaaggctttgttttcgctcttaaatggttggcttaattatgctaggtaaataatcatgttgcagaactagtttttatttaaaaactgattgaaacaattgaggaagaatcccaagtgaatatcaaactgatccaaccctctaactataactgaatcttggacccaagaagagaaatccacaatttctgaatgtttcatgcctgcttttttccagccattcagctggttgaatttcacaaatgaaatcatgtcaactgtgaatattagtattacaaatgaggaagatgtggttgtttatgctccagaatatttaaccaaacttaagcccattcttaccaaatattctgccaggtaggtatgtcacagtccccatgtcctcaaagtttgcatttcatatcactcttcagaagctttgcagcctcatcttttctgttgctgggcggtggttttttttatacagagatcttcaaaatttaatgtcctggagattcataatggatcttgtaagcagcctcagccgaacctacaaggagtccagaaatgctttccgcaaggtgaagaaaaaatctctcttttcttaagacttaaagcataaagtgatacatggttatgaaggcttaccatgtacactgctaggacatggtgaactttgcaaagggacaaaatgccaaagttcgttatcttgcacatatttaggacatgttgctgaggaagataaatcttcatgggctttaccatcttatgatggtctatgtggcacgatgattgcattgtcctgtaaggagttacatttggttatttaaccagttcatgaaagaatactgtctggattttttgttgttgttactgtgttaaaagtaatttcggggttatctattttaattaatttgattttcaggtgctcattgcacactggacatatacacagatggacaatattgatgtgggcagtctattgaaagtacccctacctggagttaaataagaccttttcttagcctatacctatattatttaaacaatcactgttttggtactatggtgaggggagtaggcagtagggattgaggaaggagagactccagcaaacatgttagttggagtcttggaaagaaaataacgtggactgattaaaatttctagtttttatccttaaaaagaaaatgtagacatctttttaaaattaaagaatgcaaaaatgtattgtgctaaatctcccttacttaggttatcctgttattcttaaatttatacacatacaggttctgtaagtactcagagttcagctaaaaccttgaaaagcagtaatgtgttttctcatataccatatttcccccattacatttattgaatatgacttcacatttatgtttgtgcagtggttacagtgttgtatgtttttctaacgctttctacaatgatattaagttgtaatagcaaaaagttctactggggcatctactgaaaatatgcctagttttcagatcatatataagtaaacaatccatttggattacatttcatcataggctaggaacatgggccttgtgaggagaagtgatgaatatttcaagaacttagatgagacatttgtgaaatgtgtgctcttaacatgctccagacctttccttctggtcaaatgccatttcctttttcttttccgtaggccctttatggtacaacctcagaaacagcaacttggagacgttgtgcaaactatgtcaatgggaatatggaaaatgctgtggggaggctttatgtggaagcagcatttgctggagagagtaaacatgtggtaatgttttcagaataatacactgtcagttatacaggacactatcagtttgttcacactgatgagcaattacagttctccatcatttggctaaaattttattaatttaggcagagaacctctgaatcataatatgccattgtttcccaataaatcttcccttgccttccccaagagtctagttatgtttctgctcctaatactgtctagtctgaaaccaactcaccattttccagaagcagtgtatttggagtacccagtaacatgttctattgatatagtcatttataaactcttctattatcaaaattgcccccaaattagtattttcttaaaaacatagaaagtaaaacaggatttatttggagtataagaaatgtgctttatttttcattgttaggaaaatgaagacagtggaacttaatggtatggtgaaagaatttattgaaatgctactttatgcttagctaaaccactaatggtaatgacagccctaatattttacattagttcttccagtatgatagtgaaaccattatattctgaaaatgatttttaccttaatgcatatattaagacctatttaatcaagagtgtcgataatagcaatattgcttttaaaatataatggtcccatatatctgttagcttaggtcacagtttgtctataaatttacgtttattaacatattaagtcatacaaagatagcatgtagctctatttttaaaaatctgtgttacaaagaatgaattaatgacctatatttgtcttctgttctgatttgaggtcgaggatttgattgcacagatccgagaagtttttattcagactttagatgacctcacttggatggatgccgagacaaaaaagagagctgaagaaaaggtaaagagcagacagctaactagcaaagaaaaatctttgctagtataggaaaaattaactttaaaaacatttagaaaaaaatataatcaaagattgcataaaaacttgtaagctccttcaatatgtagtgtttccagaaagagtttttgtggataaagatatatttctacaattttaatcttttatctctgcaaccaatactctagcaaggtgaaaatattaagtttctgttcaagcaaatgtaaggtggtgcactattggtgcattataagatctataattaaagagatgttgaagaagcttttttataactattcatgcccacccataatgtgcagcttttattgagacttttactgagtttcataagaataggtctaagatttctcaggaaatcttaggtttaaatttactgtgatcatttgtctttataattatataataactagggggaacatgtcctgtgaaaactgttaacatgctttatgagcaacattcacatgcatcctgactaatctctgtagttaggttggcagaaaaagcagacgatttggattgatagaggagacaataataaatgtattttaataagataatcaaccttggtctagttttcttttagaattaaatcacatggaaggactatcttttttcagctctcaaagagccctgagtgggttaggcctagaacctctgcccccagtattgctatctttccatcactctggccagctcttcagacattcaggttggatttgctcctttcatgtcacagctgtgcatgacatggctctgcttggtaaagccagttggattgttctggatcggcatttccaaagtggtgtcacaaaatactggacatgcaagttattccacaagaggctcatggtcaaaagagtttggtgaacacttcttgtaggaaggcttccctcatctcaccctaggctgggttacatgctcctagggtgtgattttattatcatacgtgggagttaatatttatttcactgcttatcattgctgtttacaataagctctttatggttgggggcaggggggcagaaaatactgcctagcattatatcctcagccctttataacatacctggcccttggtagacccttgaaatatattgagtgagtaaattgataaattaatttcccatcctggatatttataataacttatgattctaaccttataatctaacccatttttaattgtaagaagtcctgcaataaagaaacttgcttaatgtttttgcgacagcatttacccgaagtaattcacaataatttttttgtgtgtttactaccttatactttctgtagaatttgtatcctttagaacactctttaaggaaatgtcttacagtaaataaagtatcattaagtgggggctggattgtcatgactgatggcaaacctacaagaaaatgggtttggcctcagtgacttcagtgatacatatgaggcctgatccactgactggggaaatcctgggctcatgtgacagatttgtaataaaactgcatccatttgatgggaaaccatgtaactcagagatacaggctaaaccccccatgaaaaatttaaattaattaaattatttaagagtgatacgaagtggtaaaatcaaaagtcaagtatcattgagaaaatcaagagagaaataaaataaaaatagaaataacaagtagtaaacaagtgataatgaaataataaaataagtaaaataaaccattttaaaataattaaaaatgaactttagaagtagtgataaataggccaggtgcagtggctccctggtgtaatcccagcactttgggaggccgaggcaggcagattgcttgagcccaggagtttgagactagcctgggcaacgtggtgaaatgctgtctctacaaaaaatacaaaaattatctgggcatggtggtgcatgcctgtagtcccagctatttgggaggctgaaatgggaagatcacttgagcccaggaggtggagattgcagtgagccctgattgtgccactgcacttcagcctgggcaacagagcaagaccttgtctcaaaagaaaaaaaaaaaagatagtagtaaatacataataaatatgagctggaataacaaggaaaacctcgttttccacttaactaattaatgtcatttattgaacttgagaagataggtacactgactttggagaataaaggagaacataaaaactccaggaaccaatatttaggactagtattagcagtaaacctataagcccatatctgttttctcagtcaaatcaatgaggcagaaaggtaattataacctgctggaatggaagctgtaaatattacttcttctaaaaaattgaaaaaaaaagctttgagagaaaaagttcataaaagtacaaaatatgtggaacaatgagttttgtcagtttttatgttggttttcttgagaaagctgcagcctataaggataaggcattagaaactcaatttcagacctgattttcatttattcttgaacctcccaggaaagagccattgcaaagatctctgtttaagtatgtcagacactcattttatgaacagtatggatcaagttattcaattgctagtcatgggcagattataaatttgtatctgaaagttatataatcatcttcacattcaatattataattttcataggccttagcaattaaagaaaggatcggctatcctgatgacattgtttcaaatgataacaaactgaataatgagtacctcgaggtaagtctctataaaatagactctggactactgatacttagggctggtagtagtgtcatttttagctatggggtgcctgaaattatatgaagtagcctgaaaccacaggttgtattatataaagccttcaacgctggtgccagaatgatatttgttttagcctttttgttttcattagccaggactatatttggttattgttcatttggtttccatatattccattttaagaaccgtaagtaaaatctggtgtcctttaaagagtatcaaggaagggatagacatcaaggtggtgaacaacaggcaggcttcttatcacattttacacaggcttcgagtttccctccaccttctaagttttcctctactggaaaaaccaattcatgcctactgtattttaaaaacaaaacaaaacaaaccctgatatttgagaactgaaaactattttgttctgccctggtaatgtaacagttaaaagagcagagagttgcttaaagtcactgcagtgctgatttcagactcaactgaaagtcttgctgctaactctgcagtcaccacaactacatgataccctgatgacagcgaggtgatccttgcccaggtcctgggatgacagtgattcctcattcattgattactagtctagcatggggatttgcaaaccatactgccttcttctctctttccatttgcagaagaaacttgactttttcttttaaatgagctggttatagcttgcaagacccaggggtccttatagcaggagcatagtggctacgaacacagactcaaaaccaagttccttgattccagatcccagttccaccactcatttaaacttggtcgagtgactaaactatatctcagtttccttgactttaaaatggggataggagcccttagttcatcggtattaaatgaacataatattagattctattagtataatagaattaaatgagtataatgtaaaatttaaagtacttagaatagtacttggcacatggtaagtactaaagaagaatgtgctattatccacatgtgttatgtgaagattaatgtcattaatgtgaggtttgtttgacacttggtttcatttgattattataaaataatacactgaatttgtgatttggctggaatactgacctgtgatatactaatagaattaggttaactggaactacatccttttttggtaagttttttaatgctctcttttaactttattgactgatataatttaagaaaatccctatgtttttagcaaaaatttagaagataccggttttaatatttcttcccaaatcttctttataatacagttgaactacaaagaagatgaatacttcgagaacataattcaaaatttgaaattcagccaaagtaaacaactgaagaagctccgagaaaaggtggacaaagatgagtgcgtatattctcatttctaatgtgatcatctagaagcaggtctttccctcctttctttgttggattaagtgaaagagcctcagttagaaaaatattaaaaagtacaaagtcctctttttattgagaacttctaaaagcatctaattatggtatactaaagatatggatcaagactttaaccagattaaaatacctttctcattaaggtatcctcaaatttacatgtctttagtttcgtcttatgtcattgcctatcagctcaatttatttgtgaacaagattctcaaaaaccttagcttaagtaagccaattcatagctcctttaagccttctcttaggccttactctgtgtccagaattttcttctgctgacagccccaccttttttctatcagtcaatcccacaactccatccccttcatagatagttaatgtaagacttttctaaccctgtggtagtcaaataggagatactaggaaccattcttattcacagtcttcttatgctcttaatctctgcttattagtgacattagtatttcctaataactattagtttagattttattttttctattaaatagatataactaacatatttatcagcatatgtgtttatgcaccgaaattcctagaaccacttatgttgactttttctccctaggctcttagcccctagacaacaggggctattccttttgaccataaagtctcagcatctagcatactgaagaatctcagttaaaacaaaattaatgagtgagtgagcaagtgaaaaataaatatactaacttgatttgtgtggtaactaacacagtaacatgccaaagaggtgcttgtttcattcatgcattcatttatcctttcatgcatttattaacattttggaacacgaagtccaggtgtcattgggtactgggagaatcaaaggtgaactttgattacattacaagagcagaaggtagacaagacatggtgtaataaactgcaccaccaagagggaaatgtcgtgccaagcaaagtacaaagtgctgtgggcttatttgatgataagactgttctgttctcagtaaaccaagtacaggttggacaaaactgctaatggaaatgccagtgcattttaatccttactcaacatgttgaactcttgcaacactgacgtgtcctgaaagagagagcaactcttttgctgacttctaagttcatattggaacaaatattgtgttatctgatgctaaaaatgggattgcaaatattatagaatgtttagtgtcccatctgggaaagaaagagagtgaatacacatgcttggcattataatcaagttaccatatcctgtctcttgaaacacacaaaaagttatgcaaaataattatctgggtgaatttatgatctgagaaatttcttataagtctgtatatttgtatttctttaaaaatagacatactaagatttaataattgttagcactataaaatatctatagacaaatactgtcaaatattatttctgaaatggccaaattaaccagtacccataggacatcaggaaatttcttcataattctagaaatagttgttgaattattgcttgatgttttcttttgaggttaacgtagtgccagtttcataatcattttgtcatataatttacactgttcattccctttcatcatatgggctgattttctctgcattcttctctttttaagatagataatcaaaagccaaaagtgtatacaatattttaatgaatgaatggtcaatagcacacatgcttcagtagtactttttggtcctccccatgagcttctgatgatcacaaatgcaatatgaattctaaggtcttctctgctatatggagccagctttcctttctttcctatagtctgcctgtataccagatacaaaggttcaaaactctagctgcacatgataatcacctggggaacattttaaaaaacactgattccccagctcaagcaccctagaatgtgatgtaattgttctgtagctggaacccagatactggtattctttttaagtaccacccaccaagtgagaacccctgagttagtgttatttcccttttgtgtgatatcattcctgttcatattcaattttatggaatttttcacaagatgatgcctttaatttggcaatttaggtttaaaatttatttttatcttccaaaataatcagaaaccctctgacagtaattgcatcaaatcattaagactgagccctataggatacaacatgatcgaagctcctctcattttattaaggtttcttgcagggaaagttactgacttattttgaacctgcttaatagtaataaagttggctggacatggtggctcaggcctgtaatcgcgccactgcagtccagcctgggcgacagagcaagaatccgtctaaaaaaaaaaatgtaataaagtcattactcttttttcttttctctttttgtggagcaccaagttcaagtccttgctgtgtatgtttagacagataatttctgttgcttctacttgtccacatagcccgtagttacatcttagagaattacattttcagatgctcaagatcctcactcccaaagtcttgaaagagaaatatgtgtgcatacccaaaactgaagggacagagttgagacttttgtagggttgtattgtagggcacttcagagaaatgatgatgcattaaattttcaagacagcaactaatgtaaatgaattcaattagccaaatagtaaacttctagacacttttttcccccaattcacatgctctcactgggcaaactcattttacttctcgacatcttctatcatcatcatgtcagctgaatatttgtatttgactcagatccatttactaagattcaaatccaaatgtctacatgcttatgaaacatctccatgtagatgtcttattgaccctaaaaacacagcatttgtcatttaggcaaaaaataatatctgcccattttctaaaaacctccattttactgctaccaagacagaaaccaaggactcattttaatcatcctagacttatccctttctgttattcctgacatctacagtgatagttaattcaaatctccattttaaaaaaaaagtctgcatccaccagctgctatttaaatattacgtaggaatgggaagaggggatctctagctcaccattcccatggtcacttctgtaattcagacatttctcactgttcattgactcatctcaattattatcctactttttttaccaaccaccttctatatcttcagtttatcctccacactactaccttagagatttttttgaagacacaaattggcattttatttcctgatgaaaacacttcagtgtatccctgttgcctgtctcatgatgtgtgactgttttgaagagaaccaaggctcttcataccccacactagcactccagagttccttcacattcaccctacacctcaccattgtccaaagctccaaccatatgaattacttccaaatcctttctctgtctttcttacatccttgtctcttaccctggaccaccctttatgccctggttcatctaacagaaacctacacatgatttgattaaactttaagtgtcacctccttcctcacagcaccccattgcatatttctcttcaccttgggctgttctacactttgcacattttggtcaaagtaccagtacattttactacgtttagttggactagcccctattgaaagcaaaaaccagatatttgtgtcaccagagcttaaacactaatgaacagaatgtagctctttatgaatgtttatgggaagaataaatgataaaattgccaatttgtaataatgataataaaactaactcagctgctaaaataaaaatggtcacatctggctgggcccagtggctcacgcctataatcctagcactttgggaggtcaaggtgggcggatcacttgaggtcaggagtttgagaccagcctgggcaacatggtgaaacctcgtctctactgaaaatacaaaaattagccaggcatggtgccatgcagctgtaatgccagctactcaggaggctgaggcaagaaaatcacttgaacccaggaggtggaggttgcagtgagccaatattttaccactgcactctagcctgagcgacagagagacactccgtctcaaagaaaaaaaaaaaatggtcacatccaaacatttcactatcatggctggggaagatacacaacatcatctttaacaaattcaagaaattgaggaagtcaggaagtctgcatgtgagacacccaagttaataatttagctaaaagggcctccctctgctcttatgagtggctggcacctgcaaaggacagggatttacttttttttttttttttaagacggagtctcactctgtcacccaggttggagtgcagtgacaccatctcggctcccacctcccaggttcaagcgattctcctgccccagcctcccgagtagctggaattacaggtgtgcaccaccatgcccagctaatttttgtagttttagtagagacggggcttcaccatgttggccaggctggtctcgaactcctgacctcaggtgatccacccaccttggccttctaaagcgatttaaattttaaaagctcttgattcatgtggtttctgatgcctagtatgtgtttccaaaatcatctcaaacattatgtcttttaaggattttgcgccagtttgtaaagaattttaaacatgtcattataacatagaaatagtgctgaatcgggaatataataccctttggttacttaacaatatttctaaaatatttacttctagtaacatgaattttcatttagagttcatagagcaaacatgaatctctaaagaaaaagatgtacaagaacaaaacaaaatgagtctcttgtttttagacttgatgttattttgttagtttctcaggacagaacttcctgtgatataattgtgatgggtgttgctagtgtttgtgaatcataactgttgagccctggagttaactttttataaagtacaaagaggaatctcattggtgcatctctcttgctgttctgcatcaaaatgaaagcatactgacattgacaggagccaagtcaataaacatttattgagcagctagcttgtgcagagcactgtgctaaacaaaatagatgacaaagaggagaacaagatgttgccctttactcgggagtctatgatcttaaggggcagatgattaaaaattaaatctgatgaaaggcggggtttggttgctgctattaccaggaaacaaagtgctagaacagcacttttttcaaaccacaaagctttacttattagtaaaacacaatttttcaaaccacaattaaacctttacttattagtaaaacattctctggaatcaatatgtcagcatttaaattaatattgaggtgagcagaggattcacaaaaaacaaaacaaaaatgattggctcatttctgtctgccccttggttgcttcaagcatggtgttttttttctaatctggtgcaattggatggtggcacacctctgaaataagtggaacccctaaagctggcagctcaacatctgtgactccgtggtgcatatagaaagttcctgaaaggccagcaccaccaaaaatggcagagcagttggcaccctgggaagtgacactgtagttttgccactgcaatgagtgcctaatactcttttagtgttccagttctgccattcacaacctgtggccttttaaaagccctgtggtttccttatttataaaatgagtaggctgtgctagactgtagaatgtgtctgaggttctttctggcactaaaattctgtggaccttactgtgaagttttcataagagccaggaagttttcctccttggcttctccgcatcaaatgacccaagagaaaaaaacacattcttgagtggcagagaagtacctcgcttctttctaaaatatcccttctgatttttccacttcactaatgtttctagaaccaaccttctttctaactaagttctgtatagttcaacttgagtatcaaaggaaaaataattatgcagaaattatatgggtaaatatgatggcccagcagtggaaagttgatagtctctcgagggtgggcaggcggagcaccggacacttgagacaaatgactctccataaatgtagacggagatgatttgtaaaaaggactatttgactcagcaagtattagccagaaagaagagatacactaaacttgaacaaatcagtttaatttcccaaggcagtatctgccatggcatcctcatgttttgcacatgttgtaacagatgaaaattttagatttttacgttttatgcttccattaagccaacagagtctttgcagattttcattgtgttttggggttgttagcaaaatgtgttctattggcaaaaagatttctgctttttagtcagcatttgatgagggattctgttttgtttcgttttgttttgttttccagagggggaaggggaattagaaaaggaagccgaataatttaaaggctgaaattttaggtagttcttttttaaaaacaaaacgaaacaaaaatatcatcttcaaacaacacaattaaaaggtcctaaacttccatttaaactgaaagaactttgcaaaagaattctgatacatttatttcagtgtcatctcttgaaaggacaacattcaacggtgcacagtttctgacagccaccactctctatgacgtgcatagcaatggtgccctctgccctcctagagtcacaggatgaaatgggtcagcactctgggagcttggaggacccaatgctataccaaggcccaaatagccaagtgcctactatgctcccaccactggtcttagccttaggattcaattaagaacaaaacatggaatattcttgccttcatggaattaccttctaatgagctaggtagacaatagtcttatgtcaagttatgtaagtactgagggttatacagtatggaacaggtttcagttctttcctggaagttctcagaattactttaaatcaggagaaaagtcaccaaagaaaattctgacagaaatgatccacccacccaagtgtctccaaaattaggaatctctccgaaataaagcataccaagtgtgtatgcacatatatgtgcatgtacacatatataaggttagcaaagactaaaaagattgtgccttgttgccaaacagaactacacacaaacaactggtaacatctaggaaaacagtagtaattttccattaccttttgttgaaagagaagtggcttctcccagtttagtgtcaaaatcagagtcctagcctcagacagattcaggtaagtcacccagagtacttcagttatgttaacaaccatatgcaacaatagaagttctttggtcctactgtgcttttgcctttgggtaaaaagttacacttatggatcattgggaagagcctgtgctgtggagtcagggggtgaggggagtagacctgagtcagaattcctgctttgcctcctaacctctgaacctagaatttttcctttataatctggtgataatgacttcacttttgtcctgcatggttgtgttctacgttgtataatgcacctagaacataacttaggtgctcattaaatagtaaccagtgtgacacagtagtaagaaatggtcatcttcatttttaaagaggatggcaagaaaatggcattaatccctgtaatgaaattttgtgtatggtgcagatcaacagcttaggagtaggagatttgattggaaggtgagcaggttcctattcttcttagtttaaatataattttcccagttatataacgtagtttgtaggtgtattaggaaagagattaataaccatattgtgcctcagtttctatacctgcaaatatatggatggtttgaaagatgaataaaagtatacagaaaacttcgaagtcttgatgagagaatattgataattgtaaaggattagagtgattattgtgattacaaggtaagaattctttccacccaggcgactggaggaagacacagaaaatctatcgtattgcactgctgatttcaaaggagttgctttgagactactaaatgctgagaaattgaacactggcagtaccggctcactaacaattttgttgttttcagtttttaagttacacaagagtgggtgaaaaaaatttattctaggtgcttttgcaatctagtgggcttataatacccaaaaggctataggatcagtctgttgtcttctgcttttcttcccagctataaaaattatttctgcacactttcatcagcactaagcttcttcagggcaataagagatagaagagaaacacctggttcctctgtcaggtatatttcagttctattccccacccacattgttagctcagctttgagggccatactgcttctagtggcccctctttgttttactgccaaatgcccccaaacgagaataagcttacctgacaaaattacatctcataaattaaaaataaggtttcttccttcctgcttccccactcttcactttataccacatacatgcccacatttgtatgcatacagaccaccagaggaaggatgagaaatggaagaacagtggttcatctctaaagtctgatactgctctgtggaggctgttagtgtttggcctccacactttaaaggtatcttcaggtaacctacactatctattattttaggggcaagaatcaccaccatttcactttctctttgtgaattttctcttctctgtgctgccagtcagcatcaaatttggactgcattccaaccaaaagaacttacagtttttgttacatcactgtttagttggccctgttaatttagtttttatattaacattgagatattttgtgattgatcacaaatattagacattcagtctatagttgttatcatcaccttatttaagatgtaatgatctaatcacagtacttccagaggttctgattattaccagggacaaaatgtcctgtgcttttggtaattcccagactggtttgagggcacatcaagaaagatctcaaagaagaaaaggcaaatactacacactagtgctgtgtaaacccaaccaccataattctaattttatttgaatgtttggtggtcataaatagctacctattttctttaaggtataattcacagtggacattttaatatgcaaaactctccctgctggaaatttgcaaacataaatcaaaatgcagtcttaaagccctcaatgtaatgtaacagaagagcagaaaagcactaaaacaaaaggtatgacatttatttttacaaaagcaatagacacaagatggataatatataaacttcattcgtgtcctacttttgtgatctattgttatctgaaacattaatttcatatatcctgttcctctcctctgtaatcacagtttaaaaacaacttggattggcaccttttctatttcaatattaggatttttgactagtccagagccaaaaaatatgcaactgttatttgtaattacctgtaaaacccatgtagaattcactgtcactaaaccagaagttcgcaattgagaaactgaaccctaaaaccactgggacctagatacctgttaaattaacttttatagcagttaaaactttaataactataagctgtttacctaaaaaatttgctgccacgtttgctatgaaaatgtcgaggacacatcagaattacctttcagaagtcatgcaaggaacaatgtttccccctaggagtagtaagagcacattttccattttgactttcttgccagacagcttggaatcgtatctgaacctgaattatagtaactgtctgaatatatataaacatagtcataatatatttcctaatcatgatttttgtttattttcttttataatacttcgtagtcacgtcaacgcaatctatttgttctacatcgtttctgatctctcaattttagtctaatatccctgggtttacacatacatgtttttcttgtgagtcaacacaaattatgtgggaagcaaatagagtttaattaaaataaataaaattatattgttgtaatcatcaacctgcaagaaatactaaaatactgatgactcggctgtaatgaaattaaggaggactgatattatcagtccccccccatcctgtttaaaaatgctttctcgatttaaaacaacagcagtaacaaactaaggaagaaacatgttgatcaatcattcttccccatctccaagctttttttcttcctaaagaaaaattaacagaaatgttaactaaatttttttaagtcccaaatcctttatataaaaagtcttgataagttgttgtagacaaaacccattcttagaatttatcagtcagttgttatatattgccctgtgctagttatttttaagagatcaaaataaaattcacttctgacagcccaaaatagttactgacattgtaactaaagcaacattgtaactaaagcctactttgtacagctcacctggcagagcagggtctagaaacagttctgatgtaacctaattgtgctaattactgtacaccccttctgtgagtaggataattgtcatactaacagttgccatgaaagtagaacaactgcagtgaagccattagatgatgatctctgactaccttaaatgtatgcatgtatgctgacatttaagaggttatctgaagtcaagcagtatccatttttccaatgagcaagtaacgatatatgtagtagtctactaagatgagaactttagtcctgttgcgcaaaatttctgaacacatgattattaatatgcagtcttcataacatctgagcagagagacatgggaactttggctcctatcctcatccctcaaattatcatctgggagccatttttttccattttttcattcagcctatagttatttatgcatttttctcatctcctcaactaaactagagtctcctgaagtcaggaactgtattttataaaatctctgggttctatacagagccttagacatggtatagacagacagacagaccgacaaatctacttaagaatgacctgggtttcattttaaagtcatacaaaaatatatctttgctcaattagctggaatgttgtattttttgaaaacacttttaaatggcaataatcagagacatattactctaagacaactacttgagatatcttagttcccaaaaaggttctttgtaaaccaggaattaactatttttaatatacttggatctgaagttttaatgacccacacttcagtattctgtcaactgctccagaatcgttgtcatagttacctagtatcaggaacataaagctaaataaatttcaatacaatcttaacccattgcaatttctgaagtgatacattttaataggttttgcaacatcagaggcctccataaaaatccatgcaaataaaataaaagattacagacttgaatatatgctgatgtttttcaagaaatagaaatgctttcaaatgagctctcacctagtgaactaattttaatttgttgatcatgtttcaaacagaaagttaagattcatctaggaatggtaataatgctttaattgtgtgagtgggttgaatcagataatgcagtatcatttgtaaagagttcttatgttttctacaggtggataagtggagcagctgtagtcaatgcattttactcttcaggaagaaatcagataggtaaggtgtattcttaaataattatttaatatttctctatcgttcccaacctgtagtgcattgtatgaccaattacaatacctctaaacaagcacagctgaggctgagttattgctctattgaatgcatttcttgaaagtaaatgcatccgtgtaccttctttcactatagtgggaaaattcagattggtacaaatcacgttaagtagttttgtttcttttacaatattcttatttatatctaaaatggtttatcttatttctaaatatttttattttatttctaagtaccttttttaaagtcccttgaatatatctatataaagtcatattgactttaagactcattaagcattagcttcttaaagtggtttaaggtttcaagagccaacttttcacagatccagtcctcctggcaattctgtatgctggctctgtgagagatgatcctattctatgtcatcttcattcaggaaggctccaaggggtttagaaagttggaatctcaattatattcgattgaatcgtatgaaattgtatttacctagccacaattgatcaaaaaagaaaaaatttcgtaagttcgcttatagtattattacagacatatatatacattaacacatgaataagttatcatatatgatgaataactgaatgacataatatgacaaaaatattttcttcttcttgggaaggcctggacatctttgaacatacattggctcacatatatcacttatcacatacattggctcattttttttcagggggtttttagcattagaaaggtactcaactgattcagtactgccagaaatattctaaacaaatagtagagcaagcttctgcaggtgcactcagttctccaggtacactcagtcctgcccttcatttctaaacgtggtctagaattaagagagatgataatctcagcattattctaaaccattcttcttatagctcagagtctgttgtaagcctcatttttattgaattctattaccaattagattagaaattataaaaaatcttacaagatatttatcattggctaaaaaaaaactaaccttaaaataaattgtatatttttaggttaaagtttgattatacctttccccgttgctttcaagtctaaaaagagttaggttaagaagttatctacagtttcttctagtatttttatgatttctatttttggagtaaaacctgaatccatctggaatttacgttggtacatgacctgaaactgaattatataaagtaaccagaaaagactgttttgtataacatataaataataagtaagatatgtttacttggcttaaaattacttagctcaaagtctaagctaatgctttctggctagggaaatgattacccaaacccataccagaacgtgcttaataatcaactcctcagaacctttgcagtcagtcctttataatatattatttgaaaccattcaaatcttgttttaaaatgcctttatctctagagagtcttcactttgaagccctctttttaatattcagtagttctgtcagtgtctagttcatttggtactgagacaaacgtaataattaactttcaatggaatcccaagtcaaagcaaggcaacttagactccttagtgctgcattagagcagaataagggatgcagcttcatttcagtccagcccagggaggaccctggatcctatcggagctcatgctggtgcatcctcagtaggaccactctggcatgttcagtccttcagcccttctctagagtaggctcaggcatttatgccaagcaggaccttgtttgattctgaattaccccaagcccctggaggtggctccaaattggcccacttcagggattccccgatcagagaagagctgaaaatattttcattttgagtataatgtcttgaaaccaaagaagcacacagaaaaaggaaaaagaaggtaaaagtggcccaatagtggtctatttcacaaaataaacaataatcctctggtaaatcaagaattagctataataacaattctgaatatataaaaaagaccttttccaagatccttaaaataaggatccaatggaaatataaaataagaaaacttgttaacctcttttcatatgcttgcctggttcttgaacagcagaagaagggaaatccttgaaatgtacactttttttctttcacaatttaaatcttcaaagtggggattgtcttaactaaaaatagttgaagagtcaaatctccatcttttttcttgataggaatgtttatgtgggctgggtgtggtggctcatgtctgtaatctcagcactttgggaggctaaggtgggtggatcacctgaggtcaagagttcgagaccagcctggccaacatggtgaaaccccatctctactaaaaatacaaaaattagcccagtgtggtggtgggtgcctgtaatcccagctactcggaaggctgaggcacgagaatcgcttgaacccaggaggcagaggttgcaatgagctgagatcatgccactgtactccagcctgggtgacaaaacaaaactctgtctcaaaaaaaaaaaaaaaaaaagaaagaaaaagaaatgtgtatgtgtatataaatacacacatacctacctatatacatgtcttctgcaacactgtcttaatggatttgggataatgtccattataaaattagggttggtatagagtaatatgtgccacgtaagtgagcccctccctccatacacacacatagacatacaaatactccaaattagactgcatacactttctcacgggattggtcattttatgttgttatgttaaaaaaagaacttgttttgttatatagagacttactcatatcaataatttctacttcttaattcagttttcaccattttgttagaactcacacatgtaggctacattccaatttgtatgcattcctactcttcatatcaacaaaaaagtcaatttccaagaaagaaggcaaactaaaagtgcttaatccactgttcctcttccttgcatgtttacttcatggagctctagaaggcccctgtgccatgacattaggaaagctgcgcttcaatgttttgtcatatggttctctgtaagttctaggtgctgttcagtcatcttattaaaccttaaaatcgcagtcaaggaaataatttagtgtattctcctttttcattaaaattgcagaaaggatcttttaaatcaatttttttaatttctcaaatgtgtaagttcttcagtgtgttcagtctgtgtcgactataaataccttgagatagttaaattttctaaattgccttatttattcttaggagttttattttcagacttgaaaattaagactgtttccaaacatattgttactccatttaatataaaaagaatgtttagactatgcatggtggctcatgcctgtaatcccagtagtttggaaagctgaggtaggctgattacttgagctcaggagttgataccagcctgggcaacactgtaaaaccccatctctaccaaaaactacaaaaaattaactgggcatggtggtgcatgcctgtggtctcagctacttgagaggctgaggtgggaggatttcctgagcctgaaaggtggaggttgcagtaagctgaggtcacaccactgcacttcagcctgggtgacagagtaagaccctgtttcaaaaaaaaaaaaaaaaagaatgtttaattattttccaccaaaaaaattacttaattgctgccttaggctacatatgaaatattctaaaattgaattgctagcagccttcagaaaataaaccacagaagttgtgctggggaggcaaaaacagggggaagaggagacatggtcttttgcttcatggcccaatgacttatttaattaactaacttgttgacaatcatgaacataaaaaatgcacaactaagcagttggttataaacaacagttgtgatgcctactaggtaacagcaataaggctagtggggaaaatcctccttacagagatttagctgacaaagtaaaaggggaggtcataattagcaaagttgaacttgaagactaatatttaataagaaccataaaatcttatcacttgcctgaagaatggcatatcagggtatgattaaagcagcaggatctttgtagttaatatttagtcttgatagcacatttcataacagcattttatataatgggtggattttaatcaaagtacatagtgtgggagatagtattcactttaacttaataaagtactgcacataatttttatactttaaggtaaaaataagttcatggctccatttagctcaggctgctacacgtgaggtataactttcataaaaattctctaaagacaaaagtacttttttgttgtcgtgtcatttgaatgttatggcaactttccaaatttttgtagaggtctggggagcaattaaattgctcagatgctttttgaagtcttctctgtaaatatctaatatttatccctgaagcccatgcaaggttatactgtgttcagcccacctgaaagacaaagaaataacatgtgctactctgtgttaactagatcttaaatttcttaaggtcagggcccttgttttattttcttaatgtcctgcatagcaatgacccagggctttgcacttaataggtattgatactgaagggtttttttttaattacagaaagtaacgtttcagttattcagtggatgctagagttttaagccattaaagatagaattactaaactatgaacatttaattaatttaattttaatttctttctaaggtcaaagattagttacctccaaataacatgacccaaaatttgattaaacaggggaaatatattccaagggaagatactctccatcttttattagtatttaagacacattattagtatatttcagaaatagtgaaatatatttcatgagagtatatattataagaggatactggaatggggcagggaaggggagggtatgatggaggtggagaggtgggagaggaccctggggccataggccagaaagatgtgtttagctagagagcaatggtaagccttccaaagatttttagcaggagaatgatgatgcccagagttgtctttaatctggctacaggatagattcagagagtagattagatttagaatagattgtagttgtgtgagacagaaagtgggagactgattaggaaattaagtcattcctgagacaaggaatgagagtatgtgtaaacagtaatactgacaggagaagataaagatgctcctgaaagctacctcacccagcctctgcctaagcagacttgtaaaagactgtaaaagaaaggaggcatctaagataagtagaaacatttacttttgctgatagagacccttcaagggccattagcagaaataatacaaagactgagggcctagaggggaaaatgaatttgatgtttgatgcattaaatataacacatttgtgagacatctgaatggagaaagttagcaagttaatgcagatgtcagagtagacatactgaaaactacaattcatttatttattcactaaactctgtaggacacattagtaagttagggtgatcattcatttatttatcattgattattcattgattcagcacatttcctgagccctgattatgttccaggtactattctagttttaggcattgttcaattttaggcatttagataatgaactagaaaaatgtatgaaattaaaaaataaacaaatatatgtacagacacagaaatctctgctctcaaagggctaatatttgaggagctggggtaggattagggcagacaagaaaaggaaggactgtgatcataaagaaataaatagaatatgaggtagtcataagtgccttgatgaaaataaggtaaggttatgtgattgaggtataccttcaattgagtggcaatacttatttaagatattattgtagatggatacaatttctgcaataacattaaaaataatattggtgttactgagtaactatttcttccaaatatttataaggcagaaaggaccttctgaatgaaggttataacttccctttgcttcaaactccttacagcacaaaacaatcttggattgtaaagtgaatcgtgatgataaatcatagtttatagcaccactccaaggtgaactctgttgtcatccataataaaatgcctgcattggtttctattacagaaggtttttgtatataactaagtgaaactgacatagtgaacagcagcttagcaagcacaaagccaaccccaagcctgccatcactgaataatgccatggtggcatgcgcctgtagtcccagctactcctgaggagggaggactgtctctaagaaaataaaaattttaaaaacttatgccacaaataatctctaactatcttctctccttgtagtcttcccagccggcattctgcagccccccttctttagtgcccagcagtccaactcattgaactatgggggcatcggcatggtcataggacacgaaatcacccatggcttcgatgacaatggtaaagtgcagttgacattttcctttggctgaggtatatgctcataaatttgattaagagttattataatttattactacaaagctacatttattcaaacatgtatcatttctctaattttcaccacactttcaattttccctttaaattgttgcttaaagagatcagaaaattctcatagtgagttaagcaatgtgtgctttacactctggcagaatgaagtaaatattcccattgggaaaatactatggtgtttgtcagcggcagtgataatactaggtcttagtttcctggttgtatatgacgtatcttgtcatactcttaaaggacaggctgcatgtctatgtcttaaaatcagatgtaaaatcagaaaatattgcctctccaagagctcaaaagactcttaagctgcttaagagaccttttttttttcgtcttgtacctactacctagttcaagtctttgcaaacagttaggcacttaaatgccaccctaaatggaaaaatcaatttagagtttcaatcaaagctgaattcctgagaggaataaagacgtgaaatatgtaaagaggtgatagttcaatctatgacaaatttcattcacaaatggaaagtagagaacaatagagagaaaatacttaatccccattttagagagccagagaaagaaaaagagacagaaatgttagaattcttaaaaagacttactaagtgtctattaactcaaactatgcaacagtctttacaggtaggttctaatactgtttctgttttccaagtggaaaaaaataaaaacacatgaaagatttgcccaaaggtaacaaagataggaactggtagaaccagaaggtgaattcaagtaggttggctacatagcccttttcttaatcactacgtcataggcaaatatgaaaaagatggtaatattgtgtcaaaacacatgatacatataaatgcaattggagctcaaaagggagaaagatcgatgtagtttgtggttggcaaggaagctgtaggagaaaaagactttttttgtgtgcttgaagtagagggaaactatgagtccacagtgtcctatgaagggtccaggaatataaaaatgccagaataaaaatgttggccattttaaaaatctcaaaatatcaaactaaacagacttgggtcaggtaaaaaccattcaacagaacaaggcataacttcaagaatattttgtctggcggcctcttctgagatatcaagagccaaatgggtgaaatgtctgggtcaatgctgagaagcattagcaaagaaagctctggcagtccaggctttgccaactctgtgatgaggagggatgacagtctctctcatcgtctgcctaatttaatgttctgtcacacagcagtatttcagtccttgcactttgaattaaacatatcttataattcttgttgcaatgagttcccattttacttaaataaatatattataggcagaaactttaacaaagatggagacctcgttgactggtggactcaacagtctgcaagtaactttaaggagcaatcccagtgcatggtgtatcagtatggaaacttttcctgggacctggcaggtggacagcacgtatgtcattagcattctcttgaaaagttttagacatgttcaatcttaagtgtattattggtggtttctttttttaacaatcctaataaagtgtcttttttaacagcttaatggaattaatacactgggagaaaacattgctgataatggaggtcttggtcaagcatacagagtaagtaaaaaagattttctttccattttagtgatttagagtgtttctcatatttaataattcatttaaaaccttttgcaaaaaaagaaactcatataagcagtaaatgatgaatagaaaatggaaaaaaatatgagaagaaagagtggtgaatatgctaaccataagggtcaatacattgatgtgacggagctgaacacttaagtttgcaaagagccaagaagaagagaaaatatggaatattatatcagctgaaatgaggagagagcaggttcacaaaggaggcaacatttttctaagaaataatctctggaataatttttttagaagaaatgtcccataagaaggattatttcagggtctttgaccaatataagaaacaggaccttcagttttgtagcaggtgaagtagcatttgggaacaaaaatcaatgtaaaccacaggcatattaaaccatagttcatatatgatacagtaagggactgacgtgatatggttccagcacatggccttgtagtcaaccacactattatacacagaggactattaacagtggagcatccgttagaatcccatttagccttccattcattcttgcattcaatacatattcattgaggcttaataggtttggcagtattcaaagagctggagataaagcaatgaatgctttatgaaaggtcattatttgaggatctgagcaagggttaaaaaatagtctggtggatgccatgtgcataagaaaaagcagggaatttcataaaagggtggaggaatgatggtctaggaagcaacaaaaaggaatgaagatgattttgagtgtttttctcaactatgaagtagcccatatgtaggagaaagagcagcatctacttgagatgtcacaaggaacaacttgttcctaggctagaactaggcttctctaagacaaggatggatggaatgatcagtggagtgaatgaggatgtagaatcatttgttcattatagaaatgtttggattagagtggaggaggtgaacatcaatggttggatcagggaagaggaagcaccagagaagtggagaaagaggtgactgatggggcctgcagtttgtcagtgaccaaagatgatcagagtgtgaagcttgggagattaagtcagctacaaggtttccaaaagaatgagtccaaccagttccagggacatgggagattgctgctactttgaatgtttagtaatttttttgttcgatgccagacattatgcattttacctcttttttttgagatggagtctcattctgtcgcccaggctggaatgcagtggcacgaactcggctcactgcagcctctacctcctgggttcaagcaattctcctgcctcagcctcccaagaattgggattacaggcatgtgccaccacacctggctaatttttgtatttgtagtagagatgggatttcgccatgttggccaggctggtctcaaactcctgacatcaagcgatccacctgccttggcctcctaaagtgctgggaacacaggtgtgagccactgtgcctgaccgcattttacctctttgggtctggatgttcttttgttcctgtaaatattcttgagctttattctaggatacagttaaattccttgaaaatggtttgatctttttgggtcttccttttgtaacttttattggttgggatggggacagtgttcagtctagggacattattctcaactgctgagataagaatctactctgtgaatcttggggatttccattcttgtcctgtgtaagtaccataaattattatctctaatccttttgagatattgttttcctagcattgggtattttgctcacacacatcttcagatcaagactaagctgaatgcttgaggatgaccatctgtaatctctgaggttctctttttgtgtagctttctcctctttagtaacctgttcttggtgtccctgaactctcagctccttatcctcaactcaaggagtacccccagctctgactggtttgctcctatgatatggcctgaaaactctcaggacaataagctcagcagtcatgggactcactgagagtaaagtttaacatctctcaggggtcattctccttttgcctgatgttcagtgttatgcaaaccattgttttaaatattttgttcatcatttagttgtttccacaagaagttaaatccagtccctatcattccatcttggctgaaagtggaaggcattggcactcaatattcccatggtgattctaatacacagccagattgagaatcactgctataaaatccagccaaagttgggattgatagtactcccatggagaacctcacctagagcaagtacagaattgttaatgatgaagcaaattacaattgtgcaaatattttattacactttgaaaatatgtaaattcttaacgtgtaatgccttgcccccctgctagattgcgagctctctaagagggagcaggtgcaagcctttcccatatccccagcatctttacatagtagaggttcaataagtctatgttgacggtaagtggaagaaatgaaatatattttctgctcatctagttggtcacattcctttgtattaaattggaaatgacacatctcagaacgtttattatgaattcgttttaaaagtttatttagtagaggaaaactcatttttttcagtagcataaatctttaagaattaagaggattttctgacattcaaattacctaaatattttccttcaaatgtacctgaggctcagtccattttgtcctgtcttcaaaagaccagaatagttgcattttattatcctcagactcattggagactaggcctctaagggatctcaagagaatcctttgacttggcaagaatcactcgatcttagtctggtgagtctattttgctaagatagtagtaactaagttaaatgtagcaattgcagacttccttggcaattcatttgtcctgactggtcttattcatcaatttataaaacaacatttagataagtttttcatcacttatttaggtcatccattcattcagttgacatttattgatcacttgacatatgccaggctcttgtcatctactattcagtagcttcttcttttcaaagcatttgtaaataaatttgatttgtctttctaatccataaaatagttgtaggttaccataactaaatgtattatcagggtgattttaacataaaatgttaattacttggtggcatgatcttttacataggtttatatataaccttaggaattaatattattgtttttctattttatcaactgcctaggcctatcagaattatattaaaaagaatggcgaagaaaaattacttcctggacttgacctaaatcacaaacaactatttttcttgaactttgcacaggtattgtgtctttcttgattgatagatatgaaaaccattttgagttataatttcacagtaagttagatgtcacatgctgagttcccttgttttacagagcatttgacttgattcactttcattgtttataatagactgttggatcatattaatgataaataactatgttcctggttgcctttcattgaacattatttgaagagcgaatggttgaggaatgcagaattccaatttaatttttctccttcccctcaacttgctcaaacaaataatccttgattgaacctgagtacatgctttgcttttcctattcctatctctaggtgtggtgtggaacctataggccagagtatgcggttaactccattaaaacagatgtgcacagtccaggcaatttcaggtgcgtggatatgaacagcaatcaaggtgctcttatattgggtccattgcttccacatttggaatttagacttttctaactctgattcttttacatttggaaattcagtgcttttttttttttttgagagtcaaaggtaggatcgagagaacacatcggagcattctacataagcatagccttggccactctctttcttagaatctacaataattataattccttagaatctacgaggctcagggcttgatctattccaacaaagatgtcgcctcagaacagtggctcaatttaaagctagaacaaagatatttctaagaggctgtgaatggtttaggcccagacccaatgagctccaacttgcaaagaaaaatttcaatataaaggaaactttctactaattagaggttcttcaatatggaataacattattcccaaagcttcaggagagagtacattgaagcacagcccatcaaggatgtgagagaaaaatgctctacagagtagaaaactgagctagaagaagttaaagttcttcccaaattagaaaatcaaagagaacaatgattgaagagagtcactccaaccaacatttgaatgttaaatcatagatcctatgtatttgtttaagaactgaattcctaatgctacccctttcccatgtactagaacacttagtcactcatttgctgatcaacaacacctctcaggcaagaaagttaaaaaaaaaaacctaaaaattttgtagggtagttggaaaatgaaatttgagaacaaaagagaactaatgggctaaatttcaaaagctctacataaaatgaatgtaagcatactgcccagatcatttactcctgggaaaaaacacattcgattatggagaaaaacacatttaattatgaagcaataaagtagttcatttaaaaattaaagaatttattcagcttgctagtatcatcgttgtcatcatcatcatcatcatcatcatcatctagtatttgccctaacatttctttcaatattcattcactcaataactgcttatggtatgcctattatctctgtaatccaagctaaatttagttctgctaagatattcaaattaactgctttataggtaatgagcaacaaaagtgactggattaattcccattgtggtttattcaaaaaacttttagttttaatttttttaaagttgtctttttccttactaaagtgaacttaagctttgaggtaagaaacacttgagttccaaccatggcttcaccatttactagctgttaatgtaacctctgtacctcagtttcttgatatgtaaaataaggattaaattatcatgagagttgctagaggattaacgttaatataaatgaagagcctattttgtgtgtgtgtgtttgaaagtccatactaggattatttgtagacaagaggtatgaacagaataagaattcttatgcattttgtaatagttccctatcagtcaaggcttttttggtgctcatttcttatgttctgcacatttcagaatgttagtaactgatcagcagttaagtaaaacgtacataagtatataactgttttctagctccaattttaaactgaaaacaatattttgctataaattagttaaattatttgtatctttaagtctttattgttgttctggttccaaagatccctcatcgactatttttcattcataacaacagaagcgtgtgtgtgtgtgtgtgtgtgtgtgtgtgtgtgtgtgtgtgtgtgtgtgtgtgtgaagggtaaatggaatgggtaaatggaatgccaaccttttgtcaaggaaattattgttttctctggaggtaaggagattttcttggcaaaaggttgagcttacatttagttttggaaacaggccacttcctggctgtacaaagtaaaacatattttttaaaaaaactttaaaaattaatagatatcgagttgctatttaagaattgtgcttggtggttatatagaaatatttctgaattagagagagatttgtaaccttatgtttaaatagccatagtattaaaacaaaaggcaaaatacacttgatacaaagctgcatcataaaaccatatttgctatgtctaacctattgttgttttattcttcctgactaaagctttatttatgtactttaaaataaactttagaagttaaggtataagaatctaattctaaggatagcagctagcatttataagctcataaaaaccaccatgcaacctaatttgtcaagggtttgccctgcatatctccataaactaaaacataagtcataaaaacctaggtgaatttcagtaatattattgtaatacctagtatatctaccatcctcagagaatgagaggttgcaaattaagttttgataggtaaagtttgtctcttttaagtattaacatttttatcttaaccactggattaaaaattatctattaaaaacacatttctaccttcctgccttaaaacaatatcctgaaaaaaaaagcctaaccttttttaaaattttgatgacacagactactttatgattattagttatggttttactgtttattaatttagtctgtggagctatttattcttataccaattgtgatgctttttgacttattttgggtttttattagggtttttctgtgtgtttgtttctttcctagttttctttcctattattgtattgcctgcctttagttccctaattcctccattttgattagctcagaaaacattttgttaaatttaaatggtatttaatccaaaaacattcttcttttaatagtctagaaattgaatctataatttaaatattgacttcattttggaaatccagtttttggttagccatctatagtcatttcagggaatatttattataatatttatatgtaatctataaatatgtttctaaaattatttagctgtaattttctatataatatgtaagggtctgataattttgtaaagcaagtccaaatagacaaaatgatttaggtgcttagattactcaacattatcttccagtcaggaagaaagggcacttttagaactgacaccactatcaaagcaagaaatgtttctcacagcttaatttctaatattttgaaggaatattttgtctagtgttttatatagacatgtcaactaatatggctattttgttccttcataactctgtaatttagcatgctaataagccctctttgaaattcttctgtttcttccatttcccttcaatattagcattggttcctgatatttatagatatcaatatagattttagtgagttttgcagaatttctgttagcccctccaatctttagctgataactagaaatctattacagcatttatttatttatgactgtatagcagaacatacactcatcaatatgactttgctttgaaagaatcataaaaattagttaatgatgaagattggataccttattcctgaatgaaggcagttaactatgtagccaagtcattcatttacaagaattaacaaaaggttgtctgaggacccattaattgcaaacagtaattcagaagtccaattgtagtaggcaggaatagtcagataggatataaagtccattcttggtcccaatgccaaatctcttagatgtttttaatgcaagtaactgtttgccaagggaataaacatcagcagtacaataagttattttacataataaagtaaaaatttcaagtaaatcaccttaagaaataattaataaaagctttattatcttctgttattagaaacacaagcacacagttttgtaaagcatgaaaatcatgtacatatcttctaataacagaggataattcatgtaatgtgatctcactcttagaaaaaaagtgttttattaataatggattcacttttcaaaatagattatctaggcctggcacagtcactcacacttgttaattccagcactttgggaggccaaggagggaggatcacttgagctcaggagttcaagaccagcttgggtgacatagtgggacctcgtctctattaaaaacaaaaaaattacccaggcatgctggtacatgcctgtagttccagctacttgggaggctgaggcaggaggattgcttgaacccaggaggtcaaggctgcagtgagctgtgatcgtgcctctacactccaacctgagtgacagagcgagaccctgtctcagaaaaaatagatgatctattcaaagatttgatgtcataaacaccaaatgttaactaagaaagtaagtgaagccctagtgtgttgttgatctattcaggatcaaattaggtagagtctttggatggaaagaggatgggcagaatgggcatggagagctgagtgcacaccaggctgagtatttctgcagtgcccactctctgcggtgttatctgaagacgtttctttcttttaggtgttttttgtttgttgttttaacttaattttgagatttataaatataaatcctaaaaatactttttaagaaaaatatagaattaagtcgtgggtttggacattattaccgaagtacttgttcccatatgataaaatctaagaaaaaatcctttggaaaaaattaataaaataaaaacaaaaacatgcagctcttccagtcagtgatgctgatggcttaccctgtcaaccagggagcttgctccctagtgtgaggaatgcccaggatgacaggatgactgtctttagccagtagctaggcatcctgaattgggaagaaggttgcattaatgaatcaaagctcctctctaacataaagaatccttgagtcccgcaacctgaaagactaaagaccaatgcaaattcctaatttctaagctcttttaattcctacataaacagtcacttttgactacattatagaagtgatttttttttggctcatgaacaatggaaatttgtttctcacagttctggagaccggaagtctaagatcagggtgccagcatgatcaggttctggtgagggccatcttctggtttgcagactgcagacttctccttgtactctcacatggtccaaatagtgaatttgtttttcaatatttcagatgtaagaaatggacatttgtttttttcaatcaaattaagccaaactctgagctcttagaccaagctaggagatgagccatttactttcagtggtttttcaacgtactctttcagggttattcaggaatctgatatcatcacacaggcatagaaattagagaatagcctccatcttcagcccaccgtggtcactgctgagatccctacagtccaaatgctccagctggagtcagtggttccatttccttccaatgctcatgagctccagagcctccactcttcatgtccaggttctccaacaaccacacgccatgctatcagagggcctctcggggccttgctcagagcaggaagcatcttcttgtcattcacacaacctgccattactggaacctaccccattcttgggaaggccaatcatctccctgacaagtggactaatatataaattccccagcttctgactccacttcacctcaaccctcccacaccaggagattatttttcgtctttaagactcatctaggaatcctaaaaaacaaacaaccagaaaagattacatcctccatgaaagataggagagttgtggtggagagggatagagaagttagttgatgcgttgatgggtgacatattagaaagtcagacttacaaaaaatccatatggatctctcttttctggaatgaggaaagggaaagaaaatgctttctttctcttccagttggtccataatatcaaacaaacaacagaaacactaagtcgtgtttttcttcctaataccctattgcttctctacaggtaatcactgtgaccaaccaggtcacaggttaattcattcagtatgtactgagtcctgtgctggactttgggggtgcagcagtgagcaagacatacacagtacagcatcttccctcagcatctgtgggggtttggttccaggctccctgcagatatcaaaatttgtggatgctcaactccttgatataaatggtgtagtatttgcatataacctatacaccttctccctcctatactttgtcacctctagattacttataatacctaatacaatgtaaatgctatgtaaatatttgttatactgtattctttagggattaatgataagaaaagtaagtccatacgttcagtagacaaaatatttcccccacatatgttcagccgcatttggttgaatccacagatgtggaactcaaggatacaaaggctgtattttgccctcatagaaattagtctagtgggtgtgtcaggaagtaaaaaaggagaacaaatcattgtaaatgtggtaagtgctttgatagggatagtccctgtaagaggagttagtttagatggcattcaaagaagggggccaaggaaggaatatttaagcaaaggcatgaaggctgaggagttagccatgtactgactggtgagtaactttccagggagtagggtctgcaggtagcaggaagctctgaagagggacagggtttggctggtttgaggaactgaaggtaggtcagcatagtttgagcctaaggaggaacaggaagagaaatgtaccacgaggaggctatagaggagactggagccatcaggaggacattggaagccatggacaggagtttagatttccttcaagtccatggaaggttttaaatctgagattatggaatctgatttaaattttacagatcattctgactgtggtgtggagaatggttggaggagagagaagtcctaagatgtacacacagtagtacacctgccacgtagggagaattccataaatcaaaatggactcacctgtcatttgtgcctagtccttccaaaccagtccacttgtctctgggcccctcctcccaacccaagcaaacgtggtaggctggccttagcaggaggagaagggaaggaggtggttcagggttcagggtgggtgtgaaaacatcacctctgcatcaatgtactgacccatctctcccctcaaacactgctaggtgcagatagtgagttggactgtgttgtttttgcccactggggtcagagataagaggaaaatggcattttgccagccctttccagttattcaagctgaatccagcttctgatatttaaggagcccttttggaaaaaaggaaaataatcctctataaaagcaacaaaaaatatctatttaaagtctattatatttaagtcattatgtgagccctttcaagacatagtgagaaatcatgattatattctttgaccaaactcttattataatacaactccaaatacctgcattttcaaatgtgaattattcatgttttacaaacacatataatgcttataaattattaactctccatgacaaccttaagatgcatgttctattgtgcagaaaccaaggcacaaagaagcttcataagcaggattcaagccatgtagtctgtctcccaaattgcttttaactcctgttctttgttacttctccatttaaaaattctgttaatgagaaggcactgactcattgtaccaggttattttaagtttaactttaaattccaaattcattcacttgacctgcagagggaaatgcttcagggctccagtgtggtatggacgtgagtatcaaatgctgacggtgactttttttgtttgtttcaaaggattattgggactttgcagaactctgcagagttttcagaagcctttcactgccgcaagaattcatacatgaatccagaaaagaagtgccgggtttggtgatcttcaaaagaagcattgcagcccttggctagacttgccaacaccacagaaatggggaattctctaatcgaaagaaaatgggccctaggggtcactgtactgacttgagggtgattaacagagagggcaccatcacaatacagataacattaggttgtcctagaaagggtgtggagggaggaagggggtctaaggtctatcaagtcaatcatttctcactgtgtacataatgcttaatttctaaagataatattactgtttatttctgtttctcatatggtctaccagtttgctgatgtccctagaaaacaatgcaaaacctttgaggtagaccaggatttctaatcaaaagggaaaagaagatgttgaagaatacagttaggcaccagaagaacagtaggtgacactatagtttaaaacacattgcctaactactagtttttacttttatttgcaacatttacagtccttcaaaatccttccaaagaattcttatacacattggggccttggagcttacatagttttaaactcatttttgccatacatcagttattcattctgtgatcatttattttaagcactcttaaagcaaaaaatgaatgtctaaaattgttttttgttgtacctgctttgactgatgctgagattcttcaggcttcctgcaattttctaagcaatttcttgctctatctctcaaaacttggtatttttcagagatttatataaatgtaaaaataataatttttatatttaattattaactacatttatgagtaactattattataggtaatcaatgaatattgaagtttcagcttaaaataaacagttgtgaaccaagatctataaagcgatatacagatgaaaatttgagactatttaaacttataaatcatattgatgaaaagatttaagcacaaactttagggtaaaaattgccattggacagttgtctagagatatatatacttgtggttttcaaattggactttcaaaattaaatctgtccctgagagtgtctctgataaaagggcaaatctgcacctatgtagctctgcatctcctgtcttttcaggtttgtcatcagatggaaatattttgataataaattgaaattgtgaactcattgctccctaagactgtgacaactgtctaactttagaagtgcatttctgaatagaaatgggaggcctctgatggaccttctagaattataagtcacaaagagttctggaaaagaactgtttactgcttgataggaattcatcttttgaggcttctgttcctctcttttcctgttgtattgactattttcgttcattacttgattaagattttacaaaagaggagcacttccaaaattcttatttttcctaacaaaagatgaaagcagggaatttctatctaaatgatgagtattagttccctgtctcttgaaaaatgcccatttgcctttaaaaaaaaaagttacagaaatactataacatatgtacataaattgcataaagcataagtatacagttcaataaacttaactttaactgaacaatggccctgtagccagcacctgtaagaaacagagcagtaccagcgctctaaaagcacctccttgtcactttattactcccagaacaacaactatcctgacttctaatatcattcactagctttgcctggttttgtcttttatgcagatagaatcaatcagtatgtattcttttgtgcctggcttctttctctcagccttacatttgtgagattcctctgtattgtgctgattgtggatcttttcattctcattgcagaataatgttctattgtgggacttattacaatttgttcatcctattgttgatgggcacttgagaactttccattttggcgctattacaaatagtgcaactatgaatgtactgcatgttaccatcttacttgagcctttaatggacttatttcttcaaatccttccaaaaattattataagcattgaaattatagtttcaagccaactgtggatacccttaccctttcctcctttatcacaaccaccgttacaagtatacttatatttccctaaaatacatttaaaacttacctaagtgacatttgtagttggagtaataggagcttccagctctaataaaacagctgtctctaacttattttatttccatcatgtcagagcaggtgaagagccagaagtgaagagtgactagtacaaattataaaaagccactagactcttcactgttagctttttaaaacattaggctcccatccctatggaggaacaactctccagtgcctggatcccctctgtctacaaatataagattttctgggcctaaaggatagatcaaagtcaaaaatagcaatgcctccctatccctcacacatccagacatcatgaattttacatggtactcttgttgagttctgtagagccttctgatgtctctaaagcactaccgattctttggagttgtcacatcagataagacatatctctaattccatccataaatccagttctactatggctgagttctggtcaaagaaagaaagtttagaagctgagacacaaagggttgggagctgatgaaactcacaaatgatggtaggaagaagctctcgacaatacccgttggcaaggagtctgcctccatgctgcagtgttcgagtggattgtaggtgcaagatggaaaggattgtaggtgcaagctgtccagagaaaagagtccttgttccagccctattctgccactcctgacagggtgaccttgggtatttgcaatattcctttgggcctctgcttctctcacctaaaaaaagagaattagattatattggtggttctcagcaagagaaggagtatgtgtccaatgctgccttcccatgaatctgtctcccagttatgaatcagtgggcaggataaactgaaaactcccatttacgtgtctgaatcgagtgagacaaaattttagtccaaataacaagtaccaaagttttatcaagtttgggtctgtgctgctgttactgttaaccatttaagtggggcaaaaccttgctaattttctcaaaagcatttatcattcttgttgccacagctggagctctcaaactaaaagacatttgttattttggaaagaagaaagactctattctcaaagtttcctaatcagaaatttttatcagtttccagtctcaaaaatacaaaataaaaacaaacgtttttaatactattgcttttatgcctagtcaactctg

SEQ ID NO: 2 - protein, 750 aa, Homo sapiens
MGKSESQMDITDINTPKPKKKQRWTPLEISLSVLVLLLTIIAVTMIALYATYDDGICKSSDCIKSAARLIQNMDATTEPCTDFFKYACGGWLKRNVIPETSSRYGNFDILRDELEVVLKDVLQEPKTEDIVAVQKAKALYRSCINESAIDSRGGEPLLKLLPDIYGWPVATENWEQKYGASWTAEKAIAQLNSKYGKKVLINLFVGTDDKNSVNHVIHIDQPRLGLPSRDYYECTGIYKEACTAYVDFMISVARLIRQEERLPIDENQLALEMNKVMELEKEIANATAKPEDRNDPMLLYNKMTLAQIQNNFSLEINGKPFSWLNFTNEIMSTVNISITNEEDVVVYAPEYLTKLKPILTKYSARDLQNLMSWRFIMDLVSSLSRTYKESRNAFRKALYGTTSETATWRRCANYVNGNMENAVGRLYVEAAFAGESKHVVEDLIAQIREVFIQTLDDLTWMDAETKKRAEEKALAIKERIGYPDDIVSNDNKLNNEYLELNYKEDEYFENIIQNLKFSQSKQLKKLREKVDKDEWISGAAVVNAFYSSGRNQIVFPAGILQPPFFSAQQSNSLNYGGIGMVIGHEITHGFDDNGRNFNKDGDLVDWWTQQSASNFKEQSQCMVYQYGNFSWDLAGGQHLNGINTLGENIADNGGLGQAYRAYQNYIKKNGEEKLLPGLDLNHKQLFFLNFAQVWCGTYRPEYAVNSIKTDVHSPGNFRIIGTLQNSAEFSEAFHCRKNSYMNPEKKCRVW

SEQ ID NO: 3 - DNA, 582191 bp, Homo sapiens
  5'UTR (37817)..(37833)
  exon (37834)..(41125)
  exon (210355)..(210669)
  exon (383105)..(383166)
  exon (447577)..(447891)
  exon (450600)..(450810)
  exon (459762)..(459901)
  exon (475664)..(475939)
  exon (478488)..(478698)
  exon (483557)..(487630)
  exon (490874)..(491070)
  exon (492083)..(492236)
  exon (495564)..(495797)
  exon (517343)..(517732)
  exon (520591)..(520805)
  exon (522287)..(522424)
  exon (523384)..(523527)
  exon (526283)..(526480)
  exon (529655)..(530453)
  exon (542935)..(543069)
  exon (544886)..(545043)
  exon (552462)..(552930)
  exon (566452)..(566605)
  exon (568459)..(569114)
  exon (572721)..(572834)
  exon (574910)..(574969)
  exon (575577)..(575612)
  exon (576212)..(576834)
  3'UTR (576835)..(582173)
ttcagatgagaacatggagatgtatttcttcaggtatgcaacttaaacaaatacaaatttgataatttttacatttgtaaaaaaacatatgaagcccctcattgcatgaaacaaggaaaatgctggactggtttggtagaagggaaagagaattttaatctcccgaagcagtagaggggtaagtatatactgtaggcttttttgtttgcttttattgtctgcttattgtgggtctggaaattggagtttgggtttttgtttctgattctcctcagggttctgacttttggccacaagcagttacaggctgccagtactctgagtatcctcttgccacttcctgctgggctaatgtttatttcaccactgaacttgccttccagaactttgcagaaattctctagggaactgaatgtcccaagacctgagtttgaagccagaattgggaccctggagttgtcctaaggctcgtttttagctgtgttatcttgcaaactacagggccaagcttttttaccctcagttgccaagtggagctctcctcccactccttcactagaacttttccttttaaagtagaaccatttgaaacctttctgggcacagcagtgatagtgagggaaggtcacatgatcatgctttgaacttggctgcttgggtgtgtagcatggtgccttgggtatgtggcatggtacctgggtatgtcagctcaagacttttttactcctaaatatacatacagcagtttaattacaaccttcacgggcttctggttgaagagaggaaacataagaaacattgatactgaaatacacaaacaagttggcaaggagaataaaaatgataatcctgtgaataaccttgagattttcctaagcagatcttcaagctgacatgatcagggtccttctatagcacatcaggtgttaaaaatgtaaaaaacagtgcctactagatccaatttggctctttatttactgagattaaaaattattcatactcactctatggttatttgttgagagacacttgcaaatcaaagcctgaaaccatgaaaattacaaaacaaaagtaagttttttgaggacatgatgcaaacattccactataaggtcacaaagtttactgttaacacaatattggttagtcaaacctcagtgtgtgtgtgtatatatatgtgtgtgtgtgtgtgtgtgtgtgtatatatatatatatatatatatatatatatatagagagagagagagagagagagagagagagagagagagagagactgtgttgcccaggctggagtgcagtggcacgatatcagctcattgcaaccactgccttttaggctcaagtgatcctcccgcctcagcctcccgagtagcggggactacagacatgcatcaccacacctggataatttttgtttttcatagagacagggtttctccatgttgcccaggctggtgtcaaacttccggtctcaagtgatccacccaccttggcctcccaaagtgccaggattatagacgtgagccaccatgcctgatccaatcataatttttaaataaaataaatttaaagtaaattgaacagcatatattacttattcaaaggggaaaggttgaaatttgtcttcatacataatgaatattattaaaattgtattaaatgaactttctgataaaatctttaataatgcattgatctcaagtgaaatgctttattttaaatctcttatataccatgcaaaaatgatgaaatcattaaaagatttcctaagggatttccagtgattatatgttttggtgaaaaaaaggattcaaaagtaaaaaatgaatagaaaatactaggctcaaatatcacccaggtcctctgtggagtctacagctctgacatgccttgagccaagcagaactagggataaaaagagaaatagggggaccagcttactttggaagtgtaaaaaagacactccacttgaagcgcagtaaatacagaaggtttcctttcactgaaaaggagtgagatttcagtactcagacgcaatctgtgccctaagataacatgcttgttggcaggagtataactgttggttgttgaagaaatatatacaaaatgcatatttaacagttgctttgattaaaaaaaactaatctacgagtctgtttttgtattgacaatggttctcctaatggcatgccaaaaatatacccccagctatccatgcttaacaagttgaattggagatggattacctcttgagtactctacaattgactgcttccgttagtcttggcaaattatacagccaaattgtctatctattttctaatatgtcagcaaaattaagctgaaaaatgcatacaagaataaattgctgctggaattgcatgatgcccaccttttctttgtgttgaggaaaaaaaaatgattaaatcacactttggaatcattctatttcaatcaactctatttagatcctaggtctggtttagggaaggtctgtgagacctttagctgctgggtattgagctcagtaaactatttaatagccacattgtagctttcagtcaatgattttccacattccaatctttctccactttggagccagcctttttgggaaaacggagacccatggtttcatttcaacaaagaaggaataaccaatcatggaacatattggctgtgccaccaaggaggtggcagatgaggatttggggacttcaggactgatgattctgaatcttgacatgttattagactcattgcaatatggccaaaattttgagtatcctggttactcaaggctacaggcaagaattattttgagtgcagctgtcagaattaaaaataaaggaaagactgaatgaatgaatgaatgaagaaaaccaggacatggatgattaaaatatttctcttctctccctgcaaacatgtggacagggagattccatgtaaactctttctctcttttaatcatattcttttgttctaaggaatatttagattattttttctccagtggaagttctttcagttttacttactacagctcagtgattgcagattgctaattttgcttgaaaaccaaaggatttggttgttttcacttcattagcatcagaaagggggattggctaaagtgctggccaaggtagccttgcagaaggaggcagggttggtttggtagggagaaaagattgttctttggaaatgtatagaactggctgtgcaaaaaataaataaagccattctctaaggtattgctgaatatcaagttctctttgctgggttggagtgaagtctattgcaggtatctatggctttttcatggttgtcagtaagtgtatgccggagactaaatagtgatgcctggtgcttttttagcactaataacttttacaaaggtgttttctacctccaaactcctagaattacataatgtgtaggagacataggggaaggaagagttctggccaggatcaaagtgggggcactggtgtaatcattattctgaacctgctggtcttgagcagttttccccaaagtggcctcagccctatcaagctttgaaatatagtgccttgatgctaatagtcgttatttttttgtttgcatttattcagtacaaaagtctccagctgtgatggaactttgcccacagtgacaggagggagttattctcaatcttctgccacttctaggttgctttttctttagcagaaatcatatgtcttcactctgaaattatatgtctttactctgaaaatattttgtaaagtacttcgtaaagtattttgtaaagtactttgcagactccaactccatggtgtagaggagacaccatatcatagtgtggatttctagaaaggagtagactgagatatagacaggtgatgtagcagccttgatatcctatcccatagagacctagtggtgaagcaggaagcaatcagcttcacactatttggagaagaggaaaagttgtgattttcctcttctgtgggaaaagacccccacaaaagaagataggaccatttgtgcctccaatttcttttttcacgtagtcatttcaaagcattctctcatttttgtagctcatacagttctgggggttagcaatggcagtatgttttgaaaataaatgatactcagaagggagaggtaatagggagagttctaattccgtgagatttgtactgtaaagtatgtatggttctagcaccagaatcctcctccttttcagattatttagccctaattacttatttcccctttgcttcctaaactcctaggagataaactccttgaagaaaaactccagcttatggaaataaatatttttgctcagagaacacaggaatcataattttttggaattgaaatacccataagagtaaaagcattgtttttcttaaatatattcaatactactggccaatccagaggtctttcctgaattaacacaaacattaaaaagttgaagtttaatgcttggggaagataccaggagaactggtaggcacaaatcttgctttgagacactggccaaggagggtgttttggtagatggtacaggcagaccctatgacacgaatgctggattctgcaactgcatgtgctgagtgcagcaaagagtccatgtgctgaatgtggaattcactcattcatttgttctcaactatttatggagcatattctatgtgcaataaacacaacaaacatcctcttctcatggaaccttctcgtgggagagctttgatcagttgcttatatgcatgcactcatacacaatctaaacaacaacaacaacaataacaaaaagcccaggtgattattggacatctctatgaaaggcactgggcaataaaatggcaagcaagaatcttttcccctagagtaatcagcgtgtttcacaattaagaggtaaaatatcataaaagtcttcccctacgtttgtgtgtggttttctttcgttgttcaagttgatcgggatataattggttgatactcttgaataagtcaaggttgcaagcagtggacaatatgtgttcaacactgaatgatgggaaaaatacaaagtggtagaattcatataacactgaatgataggaaaaatacaaagtggtagaattcaaacattttttggtagcccaagatttaaggcaacaataaaccattgtttcttcaactcatgttttaaaaagtcattataaactactttaatctctctgtgtgttcagtaagtataatagtgtgaatattccttccatcagcgccaacaacattgatgcatcttatgtcctgtgcaaagtgttgctgatagaaaaatgggtgagacatagttcctacccttaaggagaatataatattgaggatttgaaatattacgagaatctgcttctaaaagtaattttttcttatacagttttgtagatgcatgtttaggagataaggaaaactgagctatgaatataaagtacccagtataaacacaggcaatcctcttgccatttctaatcaagtatatataaaaatgacattctgagaatgcttgtactagtgtttttcaaactgtattcagtgaaaacatgttaatagttatgggagaggagtagggatgaggaagacagagggagtttttatggtcaaatcagtttgtcaaacacgggtaaaggaagtaagcaagtttttcttatgcatgcttctcccaaaactttaatttgctagtgtgcattgtgacactccaggatgggttattgcagtagttcccaaatttagcatcataatcacaaagtcctgggctccagagattcactgaaacaaaactctggcaggtgagaactggggattttcatttattaggttggtgcaaaagtaattgcgatttttgcaatgagtaatggcaaaagctgcagttacttttgcatcagcctaataaaacacatttgggagattacttttaggtagtcttagttacttttaggcagagtcagtttatttcagcactggtcccatgtaccattgacatgcaggaaggagccctccctgatttgcataacagcagaacatcgtttatccaagaaatgcatattgacatttatggaactaacagtttggaaatgctggcccatgcattcttttaccaaaggcctaaagaaaaaaaaaattataggtaacaagttcactagtttgggacttagagttaatgtatattttgtgtgtggtggttaagatagcactaaggatcaaattcatttttttgaacccacattgatggtaatttattatttttaaagtggtgcttatggctgggtgcagtggctcacgcctgtaatcccagcactttgggaggccaaggcaggtaggtcacctgaggtcaggagtttgagaccagcctgaccaacatggtgaaaccccatctctactaaatacaaaaaaaaattagctggtcatggtggcacatacctgcaatcccaggtacttgagaggctgaggcaggagaatcacttgaacccaggaggcagaggttgcagtgagctgagattgcgccattgcactccagcctgggcaatggagcgaaactccatctcaaaaaaaaaaaggggggggtacttatttataatgtccttagaccattttcccccttttttcagctaatattctcacacagtttgaatttaatttatagtaaactttgctttgttctgtcactttcctagagaacaatgcttaaagttgttggatatataaaactcaaattcctagagataggaaattgtataattagggtaaatttgataaggtgttggcatgaaataagataactctttaaagagagaagagaatgaaggatcttatttatataactaattcttggccgggcacggtggctcactcctgtaatcccagcactttgggaggccaaggcaggcggatcatgaggtcaggagatcgagaccatcctggctaacacggtgaaaccccatctctactaaaaatacaaaaaaaatagccaggcgtggtggcgggtgcctgtagtcccagctccttgggaggctgaggcaggagaatggcgtgaacccgagaggcggagcttgcagtgagccgagatcgcgccactgcactccagcctgagcaacagggcgagactccgtctcaaaaaaaaaaaaaaattcttggttgtttttaggtctgtactctagattattaatttattattctgagaggggttacagtggcataattaagatgatctaattagacaaaaaaatttactggtcctgaaaacagatcactttcctgagaaaaaaagaaaaaaaaattggaaaaaccttcaaagaggtttgcctttctcttcataaacactattatgcagcatttcagagcaagctacggagctgggcttgggcagttaaatcctgactttgtggttttgtgtagacttgggggtgcagctgtatcttgagtggagataataaccactaatggtaaccccagacacagctattagtgtcagattaaatctaaatgcaaccttcttttccttttgaatattctctttggtaaaatgtttttcgtaaactcctatttgagtctctgctcacttactttgtttcaagagagtataaaccagatcagggtgattgttcaagtaaaagtgactgaggctcaatgccatgaacattgagattataggtgtatgaaagggctttgaaaatttgtgtatagtcatcattgaaaaccttgattgctgaaaatcagactctggttagatgtaggccttgtcctaaggtccaagaagaaaacatgaatgtaagataatgaaataccacaccaatacagccctaccttggagatagtgtgggttcaggtccagactaccacaataaagtgaaaatagaaataaagcaaatcatgcaaaatttttggtttcccagtgcatatgaaagtaaggtttacactgtaacctattaagaatacaataacattatgccttaaaaaatatacataccttaatttaaaaatactttattgctaaaaaaaaatgctaagggtcatctgagccttcagtgagtcacaatgtttttgctggtggaaggtcttgcctcgatgttgatggctgctgctgactaatcagagtgatgttttctgaagtttgtggtggcagaggcagtttcctaaaataggacaacaatgaaattgtcctcattgactcttcctttcacgaaagattcctctgtagcatgcgatgctgtttgatagcatttaacctacagcagaactttcaaaattggagtcagtcctctcaaactctgctgctgctttattaaccaagtttatggaatactcctaagtcatttgttctcatttcaacaaagttcacagcatcttcaccaggaatagattatatcggaagaaatcactttctttggtcatacttgagaaataacttctcatctgttcaagttttatcatagattgcagcaactcagttacatcttcaggttccacttgtgattctagttctctcgctgttcccaccacatctgccgtgacttcctcctctgaagtcttgagccccttaaaatcatccatgagggttacaattaactttttccaaactcctgttaatgttgatattttgacctccccccaagaatcacaaatcatcttaatgacctctagaatgatgatttttttctccaaaatgtttcaatttactttaccagattcatcagaggaatcattatatatggcaactatagccatttgaaatgaatttcttaaatagtaagacttgaagttgatccatgggctgcatagtggatgttgtgttagcaggcatgaaaacagcattaatctccttgtatatctccatcagagctcttgagtgaccaggtacattgttaatgagcagtaatatatatatacatatacatacatatatatatgtgtgtgtgtgtgtatgtgtgtgtatatatatatttgaaacagggtcttgctctgtcacccagtttggagtgcaatggcgtgatcatggctcactgcagcctccgcctcctaggttcaagcagtcctcccaccacagactcccaagtaactgggacagaagtgcatgtcaccatgcctggataattttttaatttttatttttgtagaaacaggatctttctatgttgcccaggctggtctcaaactcctaagttcaagtgatccccccatgttgacctccaaaagtactgggattataggcataagccactgcacctggcacagttaatacttttaagggaatctttttttttcttttttttttttttttctgagcagtaggtctcaacaatgagcttaaaatattcagtaaactatgctataaacagatgtgctgtcacccagcctttgttctatcgacagtgaacaagcagagtagatttagcataattcttaagggccctagattttcagaatggtaaatgatcagtggcttcagcttaaagtcaccagctgcatcagcccctaacaagagagttagcttgtcttttgaagctttgaagtctggcgttgactgttttctagctatgaaagcttcttctttcaatagaagtctgttttgcctacagatgaaactgattttcaaatcagttgcttcagcgcttgctgcctcatcttgcactgttatgttatagagatggcttcttttcctaaacctcatgaatcaacttctgctagcttcggacttttcttatgcagcttcctcaactctgtcagccttcatagaattgaagaaagttagggccttgctctggattagactttggcttaagggaatgttgtggctggtttggtctgctgttcagaccactaaaaccttttccatatcagcaataaggctgttttgctttcttatcattcttgtgttcaccaaagtagcacttataatttcctgcaagaattttttcttttcagtcacaacttggctaattgatgcaagaggcctagctttcagcacatcttggctttcaacatgccttccttactaagcttaatcatttctagcttttgatttaaaatgagagatgtgtgactcttcctttcacttgaacacttagaggacattgtagggttattaattggctgaatttcaatattgccatgtgtcagggaatagggaggcccgaggagagggagagagatggggaatggcttattggtagagcagttagaccacagtatttatcaattaagttcaccttcttatatgggtgtggttcgtgggaccccaagacaattacaatagtaacatcagagatcactgatcacagaccaccctaacagatataatatgaaaaagtttgaaatatcatattctgaaatgtgacatagagacatgatgtgagaacatgctgttggaaaaatggcgccgatagacttgctcaaagcagggttgctgcagatcttcaatttataaaaacataatctgcagtgtgcaatacagtgaagtgcaataacatgaggtatgcctgtccatgaatagtggcatctaatctatttcatgactattatcattaatctaaagatacactgatgaaaagaccaattactgctgacatttctgcaagttggaactctgtatattcaccagaggacttaactgaagactgacaccaggaatttgaggatggattctagcagagatattctaggaaccaggacctttaatctgatcacatttaaaacccgtttcaaacatgctagttaaattatgtcaagtctctggggagatatctctggaatctgaacattctctggggattgttgtttgacaggtggagcaggtgagactcatacagcatgtgaagtcattaaggtacaattatgacaagcttgacttgatcctttctgatttgcctgccagccttgacagctccaaacagttggtggggacctgaagacaccacttctctggttccttacagcacaaacagggaatatattctgcttcctttggctagagctacatgaaagaaatttttgctgagaaagtgtagaaagcccttaggttgatggttaagttagaaactttggccctattatcagtgactccctaggtgtacacaatgagtataacagttttttgttgttgttgtttgttttttgtttttaccttagtcttcttcctcttcatttttttaactcctttttaaacctgtgctttaattgcaggtagacattttctcattctgacaggcaactccttactttagccctcatttgacgtgtggctaaaattgtgtctgtgctttggaatgcaggactttggcatgtctgcagcagcttgagtgacatagattaagggacattcttctttttttgagatgagtctcgctctgtcaccaggctggagtgcagtggtatgatcttggctcatttcaaccttcacctcctgagttcaattgattctcctgcctcagtctgctgagtagctgggactacaggcatgcatcaccacgcccagctaatttttgtatttttagtagataccgggtttcaccgtgttggcgagcatggtctcgatctcttgacctcgtgatctgcccgcctgggcctcccaaagtgctgggattacaggcatgagccaccatacctggccgggccattctttatttgtggggatgtgtatatttcttttatgcattactaagccctttcagcttatggtctagctctcaagccatatccatgttggtgagaaagtttaaaacacacagtaattcttgggtaggcaacataatattgcagacaaccagtactgaacaccagagtcatggaggctccatcatatactagctatgtgattctgagcaagtagtttttctttgaagcttcagtttacctatctgctgaaatgtgaaaagtggctaattaaacctacctcatagagttgtcgtaagtgaaatgacatggggttggacatatttgctttctaaagaaacgtgatgttatttcagcaataccagggtaatgaatattgtgtaggcaaaaacaatcctgtacaatattgcagacttcagcctagtttttgtgcaagctgctttctgaattaaaggaattaaaaaccagggaaagagttgatcctaatccttctaaccgccttccatgtgaattgaacacacttaatgtctgtattacttattggatgcggtagacaaagaaggaaacatttcaaccagccatctacctgtccgaaagcccagcctttcctttaggacaacatctcttcctttcattgcctccatcaggatggttgtagttgatggtggatataatagatgtgaccttatttgaccatggctggctctccaccaaagggcatccaaataaataagcatgaagcctgttgctcctaacccactctgctgggaccaggcgcagcccgctagtgtattttccttgtacagtctggaggaacccagcctctatccctgcttcatcagaaactggagtcttattttctattggctatttactctcaagacttagaaatagggacctatattgactcacttcttatttagattactgagtaaaagtataataattctttaataattctgggaactgaagctttctggagtcagcattcactggcccagtgcaaagtaactgcttttttatcctactattgcacttgagaggcaacttgaagtttcctttcctttactcagtcacttttcaaggggaaataggaataatcagaattttaagatattctgtatgcagtataggtgcattttaaataatatttattaaaagacatggagttacttttgcttatcatgcaacttattactgaatttttcttttttgtctgtgttgaaaagaaaaaggtggaagaaaaagacttatgtaggcttcctattaaaaggcacctagactgaatagaagattcccttttatttttttttctacttgcaaagccaagagtcagagccatggaatcagagaattcaagttctttatagttcaagcagaatgaagcagggaatggacagaaataggtcatattgtgatcgcaaaactaggacaatgaggagtttcttggaggattcaagctctgatggattcttactttggggcagagcatttcagaaaattcagaagccaagagatatagtatatggcagcctctaaaatattttaaaaacgcttactagtctgcatattcttttcttgtaaaaagaagttaaaagatgcgttttctttaatcacttgtcaagacagtggctttctccaggattataagacagtggattaaatgtatctttcccattgcttgtggcccttgaatgattttcagacatcattgactccacacatgtttaaaacggagtcagcagcagcaaccctttcagtagctgaaagctccgggtcccatccactgggtctgcaagtaagtagccatttggcagtgactctgaggaagtcacttaacccaagagagttctcaccaataaaacaagggggatagtttgcctctttaacttctaaaacgagtatggtattctcactttggagtgcagtttcaaggtaatcttggaattcttgaactgttgctcttgatctaaacagttacaaaaagatggagagagaagaggcagaaatttccatgagtccctgtgtctacctttctttttctctttccaacaagaggatagggtggtgcccatgaaggctatgattttcagccttgcagacagctctgggagttgtttgggccccagttcctgtcttgttcctgctgctcatccatttaggatttgagtatctctctcattcctttttcttctcagttctgcctggacattaagtgcttttgactcccataccttacccactcttgccctcctgcttccaaatgcaactccctacctcctgtcaactcctgcactctgaacacgaaatcatacttagctagttgccagattatttgattaaagcagtagaagctagggtgacaaacgatgctatacttcagggatatttgcatttttaacatctggtcctcctgaaagggatctccagttggtgaaatatacacaggagataagaataactgaaatgcttttgttctatataaaaggcttcatattgatcattgagttttctgtaatcatcgtacaaggtaaatgaactaagtagtgatatcctctgggtattttattttattttacagctgaacctcagggattaatcagaaattgttcagggttatctgcctagaaagtaacagagaaagaacttgcactcaagtcttcccatccaatgctctggcttctgtaagagccactacttcccaagtgccaccttacgaggcacgtgacagccgtgtgtataggggacataatgactttagaagttgactgctaagttagatgtaattcaaatccatgtgccctcaggtttgcagccataaaacatcgattaccacctttttggctttccacatattttaaaaagtggattcattgaagacagaggtgatgaattgtgtggcatagagaagtggggatattttttaactgtgacttcagctgttgtccacctggggagggaggtggggtgatgtgacagtggggtaaagcactaggccaccatcgactttgaggctttaaaagactgtttaaattaccagattataaataattacttaaaaaccttcaaacaataaagaagaatatgaaataaaatatactatctttctctttcactattctaatccctcttcttttatttttgagtgtgtaatcatccagactttttttttttcaataccatacaaaaattggtgctatagtttcagcatgcctcttttgctaggtattacatgtgggggtgctatggtccactccaaacctcatgttgaaatttgatcctaatgttggaggtgaggcttaataggaaacctttgggtcatgggggtgggtccttcttgaaaagattaatgccctccctccgagatgagtgagtgtttgctctgtttgtttctaggagagctggctgttaaaaagagcctggcatctccccttttgctctcttgcttcctctcctgccacgtgatctctgcacatgctgacttcccttccccttccatagtaagtagaagcagcctgaggccctcacctgatacagatgccaacaccatgcttcttgtacagcctgcagaacactgagccaaataaacttctttcctttataaattacccagcctcaggtaggctgttaattaagtttatattctgctagtcacgtggaatatgtacatctttttatagaattttttttttctctttgtgaagacacactactgtgaaggtgtagttcctatccttgtcccaaatttttaaaaactatttgtgttccacttagcttttatttaataagagctctttatttttagggaaaaaccccaaaaccgaaaacaaacaaaaaaaccctctctccagttctagcttgttagctttttccaaacctttgggagcttgccttaccaatcaatgagtcagaaaccttgacagtttctgcagtaagaaactgtcggggaggaatgaagtttgcacactgggtgataccagaggaagatttgacctgtgcttagtacacttcagctttatttgaatgtttttcacagtcattagaaatcaggcaagtttttaaagtcaaacattaaaatgactacatttttaaagtgaaggttgcaacacttagcatgagaagaaagctaacagacaaacccaaaaacagttgaaatgtagtggaaagagaactgaagcaaaaacattctcttcctagagattgtttaagaccttcagatgcactaaacattgaaagatgataatgtgcccatctatgtaagtcaaaacaaaatgagacctttttgaaatattacaaaactccatgtatgttgaaactaaaatagtgtgtttctagattttatgattgcagaatttggcattaatccatggaagctgccctatccccctctctgctttattcatgtcctaacagtttgtctgcctgttggagaatctagcagagctatctgtgtgccctctgccttttaactctgagcaagacattttcattgtcttgtccttggcttcctcagcggtacaatgaaagatagtttatacgttaaatttcaggatgctttcaggaacatgattttataaatagctctgtgaggttggggagaaggagcaaagtcagagagtttaagtgttttgcccagggtcccaagacaaacagaagtacaactcaggtcttcatgttctgagtgtagttccttcagctgtattgcgtgggttttgagtttttaataaactctaagggcattgtgttgggtgatggacaaaaatatgcaaataaatggagtactttattgcttcattattatttatttgggtaaatattcatttgaatgttgctattatgcctacaaaatgtgtaattgttttattttttagaatattagcactttggaaggaaaggctttaaatatctgataaacacaacaaatattgaataatgtgaagtattttaatgagttcacattgactttagtttgcaaattatggtaatggagtaaaggaagggatttcttgttagggaaattgacaggagtaaagggtgtgtgtgtgtgtgtgtgtgtgtgtgtgtgtgtgtgtgagagagagagagagagaaacatttacagcttttcagatgttatttaatgctatacacagttgtttaaatgttaagaaaataaaacctgtaatgaaatactttatcatgtcagataaaatatataattaggagggctgtttgagataaatttcagcctatctttaagatgtggtagatcaagagtaatttaacatgatttagcgctgctattgcacagttaagtattgtctgtggttgaatagataatgaaatgcagtgcatataaggtatgttttatttcttcttttttttttttcaaaatgagagtttcatgaaaacctctctgaggtattaaaagtccttttctgatctgaataaatattttctcttcaggcaggtcatatattatagtttgtttaacaaaataaaggcttgtggcagaagcacatgaaatgcagataatggtaaaatgacactaaacatagcccctcagggcaggtgtggagtgttattttagcagtaaaccccttcttattaaagtgtctgtcatgggtgttttggaagcagctgaccttctttcttacaaagtggctataaaaccacatcctgacttcttttcctttatcatggacttagatactccagaactgaggtactaaccttcttgtctttggctttgtgaatgtcctaacacaatgtagtctaaagtaaatgaaaaactgaattggaactcagattttcttgttttttaaacggaattttctggcctatgttcttgatacccactcatttagaaaagttgttgactaaaaatagttttggcatataatcatggggatttgtaagtggaaaaataatacattaaacagtaatacatatataaagtactaaagctgggataaattaacttgactaaagggccatgatgttttcttaagatagcctttttcagtttagggttccttatcaaatccttctgcttcttatctatctactcccctcaattatatctcacacatgttagctacaagagccatcattttcctgaagcagctcttccatcatggtgctaacctgatcattaaaggaaaaagcaggtagggagggggctcctgaagtgcccaagtttaaagttcatggtcttcattttgacatttagggcttgtgctttgttcaccctgtgtatgagcttcctccagttgaactatactgggtcactgattctttctcagacagttcttgcactttcccacatctgtgtttttacttcctctgctccatctggatttcgggccaaaaagattccagttaatcattagaattgtttctgtcttctgtgatccacctcagatgagagcataataacatggtgggtaagagcctaggcattggaattaaatacacttaagttggaattatagctctaccacatatgaataagaacataagccaaataccttaattaaccaagcttgtctaacctgccttattttgttgttgttgttctgttttgttttgttttaggcttttagcagcttgaagacatggtttttgggttctgtctctagtgataagcagaagagagggttgaggaaggggctttactggcccaaccagaaacagaaactaaaaacccatgactgtattctctcccttgggtacccttaaaactcagttttaccatccataaaatggagataatgatacccaccgaatttattgtgagaataaaataaaataatgtatttaaggcatacatgatcacaatatctggcaattggtaggcacttagtaagatactatttattgccttctattccatagagttcctccattttctttctcctacacagcaattagtccctgctctgtgtcctcatagccctttgtttccttgctttatagtatttgctatgttatgttagtattttccctcccttaagttccttgaagttgatctctgctaggtatttcataaatgttggctgaattaaattgagttgcagaaccagtgtacttaacaacagtggggtttaagtgatctcagcgttaaaaaactagaaattttagataattgatggctccaaggtcaagccaagaacccaagcaccatatttttatgtataaaaactggacagcaagctgaaaatcagcagaatagaaggccagatacttataagtcctacccaaatgactggggaggaatgaagaggtcaaatagctgccttaggtcattcaactgctttgcaattccacatgtggaatcatgttaatggtatttgggcttcagcaccattggtctgatcctttgtaaagttacaaatatttattataatagtgattcctgtgtgtttcagattctccttaagtcatattagtaatttaattctctgacttaccctggaatcattgaaattctagtataagagagtcaaggattcaagtaaagcagcagctggccccgggacctgggaccaagagggaggtttagtaagtcatcagtgtctgtccagctgtctctctgcaccttgccttcttctcttctctatacaagtgtgttttctctcagaatccccttatttggtggagaatttgaagctgcaagtcctgtaacataatcagaattctccagattctagccttgatcaaaaactagaaaaaccatggaagtttttttataagctctaattatgttcaaattatcattctctctacttctgcctcataaatatacatcttaccttaaaagtatttttttttttctccatgaaaacagtagcaaggcatttttgaaggaagggtgggatgtttggtactctcctcagttatatctcatacacaggagctacaaagcatttatactcttcctaaaacatctctttaatcaaggcccttctttgattccccctcccccccaacaaaagctaaaagggagaaaaacttttgcattttctcctcagtttaaatagattacagttagtgagaaaattgagggtgaaaattgaattggtaagcaatgtagttaaccagtattcaaatatttacattttgccatgtcttctcatttaaagtgagatcatgaagaagggagactaatgacttaaagggggaggttgggtgtggtggctcaccctgtaatcccagcactttgagaggccgaggcaggtggattgcttgagcccaggagtttgagatcagcctgggcaacatggcaaaaccctgtgtctactaaaaatacgaaaattagccaggtgtggtggcatgcacctgtggtcccagctactcaggaggtggaggtgggaggaccccttgagcctgggagtcaaggctgcagccatccatgattgcaccactgcactccagcctggatgaaagactgagaccctgtctcaataaaaagggagaataacatcattccatttggtagatctttaaaagtaagagtaatgcatttttaattttaacaaaattaaaatttaatgaattatgccttatgacttgacaggttccacttctatcaggatccattttataccttctacaaaagagactgatctattgcctagggttttttttttctttctttctttttaattttaatcatctatagtgggattccagaaaatactgtcaacaaagaagtgattctgcccatgagttaggagggcacaccccacttgcaaataatgccattcattcattcatgtctagcttatcattctttccctggtagaatgtggaaacactacctggaggagaaaagatagctgcctcaattatggaagatgccagttgaaacagccccaggccagcatatgtgaaacctgttcagagtttctctcttctatgggtgaagagctgactcagataagaattggccccaattaaattacgcttacgtgagggaatgtcaggctggagggactgccctgcgtgttcaccattgattatacctgtggaaattcttatccagaagggactggtgtcaccaggatcttgatgagctctgcatatattacaaaggagaaatgcttactacattaaaagtctgatgatgtcgccacaatgtttgatgatgccgcagcaggaacattagacatgaaaccatctctgtcctctgctgactttgagtatctttgggagttacctgtagtccatttgtccccatcttatgtgttagatctatcttctgttggtctacatgagaaacctaaacacttgtttttgttaaaaaaaaaaaaaaaggaaaaataatccccacctatctttccctcctgacttagacaccgaatgtattcaaaattcctaaatgatttcaaattgaaggtttcactctttgacttgttatttaggttaagtggctttcttgacaggcaagagttttgcaatcgattagatgatggacagaaggtgatgtattgtaattattatgcatgtccttgggtttaagtgaggtaattgtatgaaattatgtagtcaatagctactccctcccacttccattccaaaaatattgtggctgtgctgtaaagctcaggtgttctgcaccttatataaaaaaccttaaaagtaccatccctaaagaaggcttatttagaaacatatatatattttttattttgaattgtgtaaaaaaagaaacatgtaaaattgaccatcttagccatttttaagtgtacagttcagtaatgttaagtatatgcacttttttttgcagttgtaggttagtggttttgaggtggccctagtctaggatcaaggggacactgtgtgtcacatcaattatgaacatgttataaaaggaaattgaaaatgaaattaaaatggaatcagtggagaaggaagaaggagatatattaggacaatcattccaaaatcaatcccaaaatcaaacagacacaacaaagtccaaagtttcaaaaacatcagattggtatgcattgactcctatggatttttttttcagactttcagcccctttaattaggtcagaatggcaggcaaggggtggggaaggtggtgcttcttgagctccactcagcaactggtcagttctcatcctctggcaactggatcgtgctggggttgaagcagttggattccatgatgggaaggtctttggcctctcggtatttcacaagcatctcagctctgcagtgggcccactctcgcatcctgtaatcaggcagataggccacaaaggtgctgccaaggaccgggacaatggagacgccaaagaagaagacaactcacatgttccagatgtccaaaatggggtccttgtcatagcaatgggagtctgggttcttctcatagaagtttttgtcctcaggatctgggtcctcctgccaatgtacggtcagttccgggggctgttttcccaccacagcagacagggcgaccacagtcctggagaagctggattcccagcggaggtgggtggccaagagcctttgcatcaccactgccgccaaaagactgggagcgctcaaacttaacagcccaactgccatgacagatagtcctacagggtctccaactcctatagactctatgtggattttataatacagatgataaagatttgatgcctttccatgaactgtaaaggacaaaattatacaaataatttatctgcttcatgtttacttagtggagagatcaatattatgatggcctagaacagaactgaattttttggccatttttaataaaaccaaataaccagaaggtatttgattaacaaaatcaaataatctgaaactatcagataatttttcttgatggtctggtagtgaaatgttgaatccaagtaaactcgagtaggagaagtagagtcctaggctatatgactttcatctaagattctgtgagaggatggcaaataagcatgttctttggtcttccattaaaacccttttaaaatataatagtattataaccacttacttttggtctggggcttggaccctcattttatcgttgccatccgccagcctgtgtgacatatactcagccctcagaagcattgttttacttccctggtgaggctggtgctgtaaacatccgctgaagttcctgcctcttaacatccctgactctagaaacacaaacctttaagttagcttagataacatagcaatgatgtgtaagatcttgcaacctggtaagaacttattctgtgttagctatttgctacactgtttcccaattcaacaaatatttctttaatgcctggtacttgatcttgcagaaatatgtgtgaggcaaagggtagttgatgcccgaatttctggttcaggacatttagtctaagtaattttttgccaattttatcatttgttctttctcccaaaaacataaaagtaatggaaggatggtattgttaagccacataaggctgggagctaacatttttctttttgatctggaaaacagtttttttgtttgtttgttttttgttttgagatggaatttccctctcattgcccaggctggagtgcaatggtgagatctcagctcactgcaacctctgcctcctgggttcaagccatcctcctgcctcagcctcctgagtagctgagattacagctgcctgccaccacgcccagctaatttttgtatttttagtagagacagggtttcgccatgttggccaggctggtctcgaactcctgacctcaggtgatccatatgcctcggcctcccaaagtgctggattacaggcgtaagccaccgcacttgacggaaagtagttcttgaaaacaatagtatagtctattggattattcaagttcaaacctcgaagtacttgttgtacaagcttctctgttgctaaattccttattaatatcatttactcttgtaacatttgttgccaaatcatgggcattgaaaagcacgtttctgggcttacatttgtaatggctgaatgacatttgttcatagtggtcaaatcactagagcctcttctttagatttttttttaaaaaacgaggaaataggaaaggcatgttaaacacaacaatagaaatctattctaaaagaaaattcagatctgaactccttgggtggaatagtttggtaaaggttaaacaaattttccctgactcttgtgggacattaaaataaatttcatctaaattcttgtcagcttccctgtacagctgccctaaacatctgctgtggatgctcaaaattgctgctttccccatttcacagtttacatatgctgtgtaaactatttatttgtattacataattagtggcaacatgtacacttggtttttaacaacatatactcaggggtggcctagaagaaaactatctacttacctacatggaatgaggcttcttagtttaaggcttatcaaagcaatgatcctatttcctttgcagaagctgttgatattaaggagaggcatttaaaatctgtttaggttattgtagcttggggtagaattatggggattgtgcttgatttcacaatgcggggcaggatttgacagccgctgcctcgtaaaccatgctgcagagtaaaatgatttcctcaaagccatggaaaagtgaggccactcgaaggcctgggaggctgtggtcttggtagtcaagcagagaaaattatgcgagcctctggagaggtggccctatgttgacttgagaagattagtcttctggggtcttgattttgttggcagaataaatgcgtctgtaaagagtgagatacgagtcaggttggccaaaaactagagaacattagtccttgggaacaaacggggattctagctgtcaaggtgactgatggccttgctacatgcgaacagttcctggagaaatcttggttctaccaccaagaggtgatggatccttaattatctgttgtgggtggggacctcagaacccagtcaggtttacattgtagggatggaagtcatcccagctccagtggaagggaacccagtttctaacctcagccatgcagagctgaccttgcatggaacatgatccccagaacctctcaatggcagcagaagagctctatgcagtgcctcagctatgtaaaaattccttttgggagttgtttttttctattaatatatcattggctctatccttcccaatatagttgaattagttccgctaatctagggtttctcaacttcaacagtattgacatattaggcatgtaagttctgtgttttgggggctgtcctgggtaggacatttagtagcatctctggcctatacccactagatgcctgcagcatcattctcattgtgataacaaaaaatgtctgtagagattgccaaatgtcccatgggggtcaaaattgccccttactctatgggaaaacactgatctaatcctatgttttcttggagtttcataagacatttgtagttcattaaacaacaaatatttattgagcacctactatgtgcccagtagtatgtacgttttgtgtggggtaactgatgtccaaagagaaagtgcctttcttcgttcggtttatagtcaagttggagtaacagatattagtcaaatagtcttactaaaatatatttagaataatagtaagtattgcaaatgaaatgttctgtgtgctctgaggacacatgacaggggccagacctaattgtggagatgacataaatctgtcctgaggaatatggaagctgcagtgactctgtgcatgtttttataatgggaaatcagggcaggggaagccagttgaacttgggaaatgtgcagactcctgaggtgggacctgctctactaggatcaaaaaaaggccagtgtcgctggaaagcagagagtggtttgagataagccaaacaggaagccaggggccaggcgcggtggctcaagcctgtaattccagcactttgggaggccaagatgggcgatcacgaggtcaggagatcgagaccatcctggctaacacagtgaaaccccgtctctactaaaaatacaaaaaattagccaggcgtggtggcgggcccctgtagtcccagctactcgggaggctgaggcaggagaatggcgtgaacctgggaggcagagcttgcagtgagtggagatgttgccactgcactccagcctgggcaacagagcaagactccatctcaaaaaaaaaaaaaaaaaaaaaaagccaggctcaaatttggcggaaccttttcagccacagccttgtcagttttggtctttattatcctgaaagcatgggaaaggcattgaagtgtttctgcagggctaggatttgtgtaggtttcagctaagtggctggttggttgtagcaggagtcctatggaggggatgagagtggagatgtcagactggtaagcggcttaaggctgtagggttgctgtcatcttttgcacagtcaactgatacctggccccttagttgttctctcattcacctcattggctgtgaagtgtaatctgctgtgtctccacggccttaactgtatttgagctcactgagttcatatgcattcatgttctgtttgaaccgtctgcattggattgctttctcactctggctttcagtttcaaaaatgataccaggatcccaaagaggggattggaggagcaaaacaagctgattgtccttggtaacttcatttcaaggatacaacatgtcctaggaagtcacttcattggccataccttacccaccccgagttctaattcttccaaagatccacgttgacctgttgttaggaatattctgtgggtagtcccatgtggtgattgaaggggtgaccttggtctcattagcactgagtactaactaatccaggcaatgtgggcttatatgcaccagtcaataataaataactttaatggggactatgggagagctgaaggagccagatttgcattttgccttcttagctaagacgcagttgtcaaaatttgggatgtgcagcaggatttgcggagatccggaagactagttttctcttaggatgagctccatcacctggctttgtcttagtctctgtggcagcacctctagggggcagcattctactcaggccaactctgaagggctgggcgatgtcacatctggtctatttgtggttgccttgggatagtaaccctgtcctggacctagaatgttaggctgaggttgcttatgctgaaataactagctggaggttcttggacactttctttaaggcgtgtctacaaaaatgtctacagatgtcccgtccctgtaagaaaatatgttttcttaagtgagcatacaggaagaggatcccactgactcaggattctgcagcctcgggctctttagtggagatggagggtagttgagaggtgtccatgttgacctgttcttaggaagaaagactctgtgggtagtcccctgtggtcattgaaggggtgaccttggtctcattagcactgagtactaatccaggcaatgtgggcttatatgcaccagtcaataataaataaccttaatggggaatacgggagagccgaaggaacaagatttgcattttgccttgtttgctaagacacagttttcagtgatggtaatatcaggagacaagactgacaagatttctggattgtcagcaaacttttggattgtattccttgacccacatgcaagctcttttaaatccttggaatgcttattgctgcctatttccagataagcttctttttctcttcccatgctataatttctacctctctgcagtatgttcatccttctattaatatatgttaagctgtttggtttcttcttttcctttttgagttcattcagattgctgcctgaaatactattttagagtctcagccatttcgtgatatattgtttctttatttcttgcataattattttctcccttctcctctcctgatactcatctgctcatatcccaaccttcatgaagccagatatagctaatattatcccattttagagagctgagtgtgtatcactcttctcattcaattcattttagcaagttttcattgtctacctaccatggatgaactcagtgttgctgccttacattcttgggggacgtttagccaaatagacaagcacttacaaaaccacctgcttgagcctgtgtctgctttgtctagggcaagaactggtcccatgtgtaaacgtggtaagatttggaactgaattattattctctcataagtcctccacaaacttcaggatgtcttatcatttgttacatcttttcttggcgtttccattctttggaaaatggtcacgtgatgccccttcacctcaatgatgtatggcagctctacgtatgcccaagcctcccctccccaccatccactggctttccccttgccctgcgttaccatctctttctcaacaggaaaggggtgcaacaagggaaggtcctctatcttctgctttcgtatcttccgattttactttgtagattctcttttccttgaaagagactcacttttaaagaggaatggcaattgggatggctaaaaagatgttaacttttggaaatataacagatggcaggaacttggcagagcagtaaaaatccattgtgtcagactgtagcaatcagaggctctccaagcacttttttttctgaactacattttgccccccgactattggaattaacactatttatttgtcccatttgaaatgatttggccccttttctcttccaagctgtttttccagagtaagtgctattactagaaaaggttttcttttttttctttcttttttaaaaatcgtaagcatgagagaatactaatatatttaccctttggtttctgtcagcgaggcctacaagagaaaaaatgaaatcatgcatttttctggcacattttttcagacagccaagcataggagcaaattatatcctctccttactttttttttctcttataccatgatgaatttctttctccagagagagaagtgatttttaaaaggcttgaacaacatgctaatctttccttctgatagcccctggttgaattactcctgaatttgaagcatttactgatgaaatgatacttgacattaaccagtgttgtatggaaatatttctagtacctagggagaaaataaaggagggtattcgtaacactgccgctgtgtggctgaatcttccatttttctcagaatcaacttgaattactcttgctgcatgctgactgacttctttcctaagagaccactcttagacaggaagatttgcaccactggaaaaagctagaatttacagtattattatgatgaaaaaggttgggttttggtcgtagtctacttggctatttggcagaaccagctgaaggctttggttagggatttttttttcccttgtgcagaatgacaaaggtgatatcatatccctgtaaataaaatactcttcttgttataaagccatacttagacttagagctcagggtagacaagcagagttttccacagagaggtgaaatatgaccttggcttttggttttgtatttcaggatatttttgacttggctgactacttttggccattgactaagtaaaactagataagaaaaattatgaaaatatatggatgattattcaaccttgagaagattcttctcttcgtgttagaccttgtagctcacagaactgtgcaaattctctatttgctttttttctagtgggaaaaaagtttagcacagcaaattatggagcagttgtctcattcttcagtcgaaatgtggggatgtgtttatatgacaagtattggaacagtttcttcagggatgacactcagcttagttaacatgagaatttgtaccctatgatatggtgtaggaggaaggagaataatgaaagtcttcagaatcttgggattgattatacctcacttccaaagctttccaggcagctagagccacagtgtctagcttagactcaatgttgacccaattttatttcacaaaacactctttctttaagactttgcagtataggtgtggggtatagggggaaagaaaggaattcatgatcaaatagatttttgaaattgtacatattatatcccttgggatcccaaattacatagcatgattgtgcatgtaacaagtatttactgaattctgactatgcaccatggaacttcatttctaatagtaaaagtagacaataggtgctgtagtcctcacttatccatggtttcacttcccaatgtctcacttatccactgccaaccactgtcccaacatatcaaatggaaaattccaaaaataaaccattcataagttttcaatttcattccattttgagttacctgatgaactctcagttcatccctcactgttcctccaacgtcctgctgggatgagaatcctccctttgtccagcgtgtccatgctgtgcatgttttccgccccttagtcacttagtagccattttgttatcagatcaccaatcctggtattgcagtatttgtgttcaagtcacccttactgtacttaataatggccccaaagctcaagagtagtgattctggcaattttaatatgctggaaagaaactgtacactgcttcctttaagtgaaaaggtgtaagttcctgactttcataagaaaagaaaaaaatgctgagattgctaagacctagagtaagagtgaatcttctatccatgaagttgtgaagaaggaagaagaaatctgtgctggttttgctgtcacacctgaaactgcaagagttacagccacagtgtgtgataagtgcttagtttagatggaaaaggcattaagtttgtgggtggaaaacataaacggtaacacatcccgattgatggcaatcgggtttggtttcaggcattcactgggtgtcttgaaacgtacccccctcagataaggctgggggagggcactatatctactgtgctttcatatggagattaaaaagcagagtaaatttttagaggtgactcaggatgggagatgagggaggtttattttggagcatattaaaggctccaggaagttctactttaagaaacctctttatctttgttcaactagtgtttcctaaagagtattttagttgcctacctatacagaattagtgtgtcatggaacacagtttgggaaatagtgggctagctatttccacagggtctctatgttttatgattataattcctatttggactgatgttcatttcatcttctccctggagcctgctgtagagttaatggtgtatgctgactagcccagtctccctcaccaaaaattgattcaatttttaccatttcaaggctgtttgttagatactataagaagaaataaggcccataacttttcttcaaggagctatggtccaatgtatactttaaagatacacataagtaactaatctaaggaagacagtactatcagaaaggtaggtagaaataaaatacagacaatatttagagcagtggttctcaaagtggggtcccaggaccagaatttcttcagaacttgttagaattttaaattctcaggccccaccccggatcaacagagtcagaaactctgcagtggtacccccaaatctgaaatttaacaagccttatgatggttctgatggtctctagagtttaagagtcatagctttagaagaagtggtgctcacatttgaatggggaatctccaaaatagcttcatagaattggtgggtggcattttatctaaaccttctgagtaaaacttgtaggtgcagatgggtagagacctgcattcctaaaggaggcaagagctgtcagagtcaaattcacagtggagatctcaggtctagttttagctttctaataggcaagctgtgtgaccttgttcaaatcacataacctgtctcaatctgtttcctcaatggttaaactagggtgttggggtagataagcttatgatccctttggctataaaactcagtgactttacatggctttggctcagtatttcattatataatgtgaataatggcataagctaaattattgtgattcaaatacttagtatattatcttatacattctctagctacagtggtttgtattttaaagaaataacccacatcaaaccctttttcttcttttcaggcagccattagcaccaaccagggagtaaaactttattcccaagtatgtcatacgagcagtctataactgatttcaggagcaaggacccagaacataaagtagcgccatgagaatggtaatttgggtggtatcagaataggctgctctagaagatagggctaagcagtatctggctgttctgggactcatcattgcaaggagaaatcttgcttgaactccccaggaattaaatgctagctctaaggagtagttccctaacgcagctgtagcttttggagtttgaaagtgcacacacgggaattggaatcaattacagagctctggcaatagcttttggccatgtcaccatgcacaggacctctctgtggcattgactctgacccctggcacaagtttgtgatctgtgaaagggtagctttcatattaggtgtggtccctctctggaccctttatccttacctcagttttactcgttttttgttttgtatccctgcttctgaaaaccttaataattatgtcagttaatattcacggaatatttactatgtgccggacactatgttaagccttttacctgagagtgtgaactcttatactccccattttaaagatagagaaactgagatttaatgaagctttcaatattagccccaaagtcacccagccactagatggcaagtcctggattcaactcaggtttctctgacctttgaggctaacatagtgttcttcctttgcttttagtaaagaaaggacattctttcctttacctttgatgggtgtttttttctactggaaaataaaacgtagagtaggttgtaaattttactccctgtcttgtgattcccagattttgtcttctctaaaatctgcctttattaatgataatagctaacaattatatacaatgtgccatgaagtgttttaagtattttccatttattaactcaaatcctattcggtaggcattattgttctcattttatagaagaataaactgaggtgcagagaggttcaatagcttgcctggggttgtaaagctagtaaatggcatagataggattcaaatgcaggcagtcaagtgccaaggtgcatgttctgtaaccattgcatgctctgcctttgtgttggcattggctctggcactgcatacaccagagcagagactgatcttccatttgcagtttgaacacgggtcaccttcctcaaggactcctgtcaaggggactctatattgactttgttctttgctttacagcctaacatagcaaatttcttgagtaccctcccgatttggctaacaaaatcccctcaaaatagaaaagataggaagagagggaatgaaaatgaaatatatttttaaaatacctttggtagtgttcagaagtctcaccaatttaagcagaccagattaatgttggcagaaaacagctttatcaggttaccaaagcaagcataggtaccctacagagccaaggctgtcccagagaggtagtctctgtgattgctgttccctgcccccaaggtctctggtatttattcatccatggaaagaaaaatctgcatgcccttctgagtcccacagtaagatccatcctaacagagcagaagggcaggatggggaggcacaccaggaatgcctctgaaaaataaatgtctcaaagattgatggcttgatgatctctttggagattatatcaaaaattattgattatgttagtaagtcgtagaaaataggctctgaggttgggaactaagtgctttctttaaaataatctagaagcagtagaataaatcaatgtgcagagcatctaaaatactgtatcatattggcttcacaaatagcttggcttcaatgtggaaagggcaatattatttttaaaaaaaacttcaacagttgtcttggcatgctaaaaagaaaagaagacaaaattcaattctattatttgctttgcaaaattttacaacattcctagcttctagcattcatttatttcctaatcagtgggaaaactgcaaggctttttaaaataatttgtgccagatagggctttttttttttcctttgccacaataaagatacaaaagccttaaaagatattttgttttcaacaactgaatttgacaaacttagtcctgctcagttttttggtggtaggtctgaatttcagtatgtgataatactactccatttatgcttgttttgaaatattttctatttgcatttaagaccaccgattccggtttttaagaaaacaattccagcaatgtatcttgctgaaagaaaaactcactatgcaaaagcaccaatttttgaatagttaaattgaatgatacattttcatattatgatagcattctttgccttgaaagattcacagaaagatttgtaaaaagtaactatccccttagggcactttaatgtttatttataaacagttaactacttagaggaagaaataacaccagggagagtaatatggtgtcagaaaaggaagatgactccaaaataatgataaaccacagctctaaaattttaatgtaacttaatgaaaactaattcaattgaagcgtgtttcagtttggtattagctctgaacctgggaaacttgagtcctggcattaggggaatctcttcattttatggaccctggtttcttcatctgtaaactcaggagattggaacagatgatctttaaggctcctttgaacctgtataatttcttgattcagtttcctgaagtaagatgtgctttttgttggggaataggaaacggagcatattaaaggcatctgggcctctggttacattagtacttagggttctgttcaacaaaccagtgttgtttgcttcctgtgtggtgggtgctgtactggatgctgggaatagagtgatgtacttcccatcaggtttccttaagtagaagttcaaagtgtgaatgagggggcagactcagaaaagttcagttgaactgtatttttcatgggggaagttttcctctctgatgaccatggagtctagactccttgggctaaggatcggcaaaattactgttacaggaagtcttctcagcacaggatagtgagtgggaaataaggcagaaactttatttgtatttctctggagcattctgggagtgatcccagtatttcaccttgagagagtgtaacctaaccttcacattcccttacgagagactcgcttactttaccgtgttcacatgtccacagtgagcctaaaaatgtctccactgctttggagccttttgagatgatgaaatagagactcctgaggcatacaaaatactattaaagcttctgctagtgtacttctgtgatcactacagagaggttcttttgctcccatatttcagttgactgtgctctacaaagtagacaccccaatcacactgtgggcttcgccactctgctaggtaggacatttgaacctactgcatccagaaaaccccaaatgtatcattttcttaataaagtttcctttgaaatgaccagcagcccagtgatgtctttctaggaacttactgagcagggtcaccagcggccatctgacttggtccctgccctagttaccagagctgctgtccacaggctgcctgttccacttacttagcatatgcaatgtctctaaagaactgcatgtgaaattaacttcctttatagacgcttactccctttttcagcttttcatttttgctgtctattaatgcctgtaaagtccctaaattaaacttgactttttctatctgtaactccatgttttctacgggatacttcagcaaatgatagcagcaagatatcttacattcccaggcagaaccagcatttgcatgctcagggtttcacttcaggagagtctcctgtaaggtggagctgaaaaaaaaaaaaaaagaaaagccttgtggggtatggagagagcctgagctctaatctagagtctgctagactctatcaatgactattaaatttagacagtttccacagtttcatgactatgtgggttaaaaggtaaaaactttttcctattttagccagtaaaattaatcaaggagaggggagaaaggaggtattcaacaagaaaaagttaagtctatttagacttaactaataaagtcgagataggaaaatgaggttttatattatcattaacaaaaaggttataataatatgtgccttgctaaccttggatatgaaagggttttataaaccatacaatttgtaatattttaatatgttaaactcctgtagggatttttttttttttcagtttgcagccaataactagaactacattaaaaccagagaggagataaccaaaaagatatgctgggggcagggatgggttgtactttttaaaatcaatgacatatgttgactatttcattagaattaaattatgtcatatatgcttctaggatccttaattatttcattcttgcttgcaggtaattttgagagagtgattgtgtgatggggaaaagcatggattttagagaaagattaaggtctgagatcctgctttactacttgccggctggggaacattgtttgggcaaatgtctcaactaaatagattaacttctctgaccctcagttttctaatatgtcattgggtaaaatagtacctattacttaggattatcatgaagattaaatacaacaaagtggaaaaatgactgacacagtgcctacatcattacatgcctgcaaagaaattcattttccatctcctctcatcttcacgttccctgtaaaggaagaaaaggagaatgtcaagggcttgcagagtataagactggatggaagaactcatatttgggggttctaaaaatctgatcctttgggtatgaatagacttaactttttcttgttgaatacctcctttctcccttctccttgattgattttactggctaaaataggaaaaagtttgtatcttttaacccacatagtcatgaaactgtagaaactgtccaaatttaatagtcattgatgaaagtaattggaagtatctcttgtaatttctaaagtttttcttgcaagtaatcactcttacctcccttgttctgaatagttctggatatcactccagtcatataactccttagggattattgtctctgctttgtaacttgacactttgttcattctcatggcattgcattattcataaaccttgatcagtttaaaagtaagcacaataaaagatggtaataccttgaagcattttaaaaagattataattataaaagtaattatgtaactattgatgaacaatgttcattgaagaaaagttagaaaatgcaaatatgccaccaaatcccaaaacacagttaatcctttttaaatataaaaattcatttgcacatataggtgtttatataataatagaactcatgctatatatactgtttgatgaccttttttccttagcattacatcttactgcatctgaaaatgcacatcttttatgtctctatttttaatgactgcataatattttattttatgaatacaccatgaattattcagtcctctattgataggcatttagcatctcttcattttttttttactttaaactgtgctataacagataattgtctaaatgtttctataggataattactgcaaaggcagttctaagtcaaaggtaaatgcacttaaggcttccaatatatctctaaattgaccttcagaatgtaagaaatcttgtaccaatgaacaacgctgtcagtagtataaaagtgttatttaaaacaaagtgtcacttgaaaacaattcttacaagattgggctaaattctagtaatcttaagttccttattacctagtagtggcaaggtttctaattttttcttatattgctgttttagtaaaaagattttgtgataaagttttaaaaagcatggcttcctaatagttatttcccactctcccccttcttctaggatggttaatttatcttttctctctctctttcttccctccaggatggaagtatgatgtgatggatataattatgggacactgtgtgggcacacggcctcctgcttgttgcctcatcctcctgcttttcaagcttttggccactgtctcccaggggctgccagggactggacccctgggcttccacttcacacattccatttataatgctaccgtgtatgagaactcagcagcaaggacctacgtcaacagccagagtagaatgggcatcaccttaatagatctatcctgggatatcaaatacagaatagtgtccggagacgaggaaggctttttcaaagcagaggaagtcatcattgcagatttctgttttctcagaataagaactaaaggtggcaattctgccatattaaatagggaaatccaggataattatttattgatagtaaaaggttctgtcagaggagaggatttggaagcatggaccaaagtgaatatacaggttttagatatgaatgatctgagacctttgttttcacccacaacatactctgttaccatagcagaaagcacacctctaaggactagtgttgcccaggtgactgcaacagacgcagatattggttccaatggagaattctactactactttaaaaataaagttgatctcttttcagttcaccccacgagtggtgtcatctccttaagtggtcgattaaattatgatgaaaagaataggtatgatctggaaattttggctgtggaccggggaatgaaactgtatgggaacaatggagtgagcagtactgcaaagctttatgttcacattgagcgcataaatgaacatgccccaacaatccatgtagtcactcatgttcctttctcgttggaaaaagagccaacatatgcagtggtgacagttgatgacttagatgatggagcgaatggagagatcgaatctgtttccattgtggctggggatcctttagatcagttcttcctggctaaggaaggaaagtggttgaatgagtacaagattaaggagaggaagcagattgactgggagagctttccctatggctacaatctcactcttcaagcaaaagacaagggatctcctcaaaaatgttcagcattaaaggcagtctacattggcaaccccacaagagacactgtccccattagatttgaaaaagaagtgtacgatgtgagcataagtgaattttcccctcctggtgtcgtggttgctatagtaaaattaagtcctgaaccgatagatgtggaatacaaattatctcctggtgaggatgcagtgtactttaaaattaatcctcggtcgggtctgattgttacagcacggccactgaatactgttaagaaggaggtttataaactggaggtgacaaacaaggaaggagatttaaaagcacaggtcaccatcagcatagaagatgcaaatgaccacaccccagaatttcagcaaccactgtatgatgcttatgtgaatgaaagtgtcccagtgggaaccagcgttctaacagtttcagcttctgataaggataaaggagaaaatgggtacatcacctatagtatcgctagcctgaatttgttaccatttgtcattaatcagtttacaggtgttattagcacaactgaagaactggattttgaatcctccccagaaatttacagattcattgttagagcctctgactggggttcaccataccgccatgaaagtgaggtcaatgtgactattcgaataggaaatgtcaacgacaacagccctctctttgaaaaagtggcttgccagggagttatttcatatgactttccagttggtggtcacatcacagcagtctcagcgatcgatatcgatgaacttgaacttgtaaagtacaaaatcatttctggaaatgaacttggcttcttttatttaaacccagattctggtgttttacagcttaaaaaatcactgacaaattctggcattaaaaatggcaattttgccctcagaattacagcaactgatggagagaatcttgcagaccccatgtctattaacatttcagtcctacatgggaaagtgtcttcaaagagcttcagttgcagagaaactcgtgtggctcaaaagctggcagagaaactactcattaaggcaaaagcaaatgggaaactgaatctggaagatggatttcttgacttttattcaattaatagacagggaccatattttgacaagtcttttccttctgatgtggctgtaaaggaggatctgccagttggtgctaacattctgaagattaaagcctatgatgccgactctggcttcaatggaaaagtgctatttacaatatcagatggaaatacggatagttgctttaatattgatatggagactgggcagcttaaagtccttatgcccatggatcgagaacacacagacctctatctccttaatatcaccatctatgacttaggtaatccacagaaatcgtcatggagactgctgaccatcaatgtggaggatgctaatgacaatagcccagtttttattcaagacagttactcagttaacattcttgaaagttcaggcattggtactgaaatcattcaagtggaagccagagacaaagacttaggttctaatggtgaagtgacttactcagtcttgacagatacacagcagtttgccatcaatagctcaactggaatcgtttatgtagccgaccagttggaccgggaatccaaagccaattattctttgaaaatagaagccagggacaaggcagagagtggtcagcagctgttttcagttgtcactcttaaagtttttttagatgatgtcaatgactgctccccagctttcattcccagtagctatagtgtgaaggttcttgaagatctccctgttggcactgtcattgcttggcttgagacccatgatccagatcttggactggggggtcaagtgcgctattctttggtcaatgactataatgggagatttgaaatagataaagcaagtggtgccatccgcttgagcaaagagcttgattatgagaaacagcagttctataaccttactgtgcgggccaaagacaaagggcggcctgtctctctgtcatctgtttcctttgttgaggtggaagtggtggatgtcaatgaaaacctccacactccctatttcccagactttgctgttgttggatctgtaaaggaaaactcacgcattggaacaagcgtgctgcaggtgactgctcgagatgaagactccggaagggatggagagatccagtactccatcagggatggcagtggtcttggaaggttcagtatagacgacgagagtggtaagtgtaatattttgtgccaagagtgttgtttcacctcttttaaatggtcaacagtggaaaagtaaagggatgttaggacactaaaatagaatgacaaatgaggttgcatttggtgcagagacgacgcacatagatgctttttcttaggatgttctggtttgttagaagatctgtttataaactaacagctgtggtttccagtgggagtcctggtttgttttgttttgttattttcttgctcagcactattgctaccaggtcatcttttgataagcctaagtaattgtcacttctgttgattgtactcctgaccctctctaaatgaaggactctgataaagtaaattacatttgaattggctttaagttagaagtgtgaaatggattttcaaatggatcttatataggaatctttccctttacagtaaggctttgcagaagtgatattgcattagttgcttggtcttttatctttcatgggttcatctggtccttgaatgatgggcatttgcactctgtagctccattaatataaggaggtgtgcttctacaaatgttttcttaatggaataaatgagtcttgctatgaattttatttataaaaattgattttaagaatttatttgtaaggagatatttacaaaacattaaaaaatatggggcaacattgttccagtattttcatcgcttctgacttactttttaaattattcattcatagatacagatacaggttttttaaaatacttgttattgtcgctatttgtctttaaaatgttcatgtgcctggacacatgcatctctttgtgtatgtgtgtgtttctgttcctttgttagcactgtgcatttttctagattttagattgtagacatctcaagtgagggcctgtgtcttccctgtcttgtttaaatggtaatattagcaccttaccattttcagagcacatttacatacattagatacttgtccacaatatttgtagagtgcttttttccccttagtcagctcaagctgctatagcaaaataccacagactaggtagtttaaacaacagacatttatttctcatagttcgggaggctggaagtccaagatcagggcaccagcacagtcaagatgaaggccttcttctgggcttgccaactaccaacttctttccatgtcacatggcaaagagagcaggctttggtgcttttcttcccgtaagggcactaatgccatcattaaggctgtaccctcatgacctcatcaaaacctaacttcctcccaaagactctatctctatatagcatcacatagggggttagggcttcagagtatgaatttgtaggggacacatacattcagttcataacagtcccagtgatgatgatgatgattagaacaggtggtaggaaggtatcactatagacatactaactgtatatccacaataccagaaaaaatgatttaagaaactatattaaatattaggtagcaagaaagctacatgtaccatctcaagtttaaactataacttttgtatacataggctctaattatggccagtgtaaattataaaattggtctccgtggctatagtagattaaaaagtctatattaggaaatttcacccctgactttgccacatactgtatgttattatgtattccttataatttagttggaatatatttctgccttttaagcacaaaatgataaaagaggggaactagcctttactgagtgcctactctgtactaatactttactactaataacaatgagttcatcgagtacttacaatgtgccagacactgtacagagggttttatagacagatcttatttaattcttccaacagcaccatgagctggggctgataattaccaactcatgaactgaggttcagagaagacatagaatgtggagcctattttcaaacttagctttgtgtaactgcagtataccttgctctcacacatctaaagataagttggaatttccctgcatgtacccaactacactgaaatttggtgttgagctaaaatctgtaagtcaataaagtattaaacaggtttcaaaatccttgcaaccctggacttattgactaatggtgctggtcattgattaaccttcctgttttctttatagccccattgtttatatggctctccagtgatgaacttagctttgagactcaggtaaatgtggataggtaggtcataggaaaagtatgagctgaatcattcaccactgctatacagatgactacatcaagccatactgaggtttttttcttttttttttaaaatcaggaagttgcattttggtttacctgatacagtgaaaagttggaacaatttggtattagtggcctagattttcccacaggtaacttgctacagtgtttctaccttgggtgttatttagaaaagatacgtatctgcatttgctccattgtattctgaattatatatatattaaaaaaacttttattggtcagtcatggtagcctatgcctgtaattctagcactttgggaggccaaggcaagtgtatctcttgagctcaggagtcccagactagcttggtcagtatggtggaattcctaaaaaaaaaaaaaaaatacagaaaattatctgggtgtggtggtgcacgcctgtagtcacagtgactcaggaagctgaggcaggaaggaggatcacttgaacccaggaggtcaagtctgcagtgagtggtgaccacaccactgcactctagcctgggtgacagagtgacacgctgtcttaaaaaaataataattaaaaataaaaataaaaacttttgtcatcaatgatactaatgccacttacattttgacattgctttgtgacttaaaaacctctttcctataaacattaactcctttgagttgaagagtagctaagtgagtttataaggtcacataggctttaaaggatataagctgtatcttgaacccacatctcctcaatcctaatccattgccctttcctttcaattctttcatgtttctgatgttttttcatagttttaaaattatagtagcaatgtctttcctcctttattatttcattctgttcccttctcttagaaaacacaactgggttttttctctgtattacaggaaaaaaggtttgggcttgttgagattttttttaagaagactagagtgtccatacaatcttaaccatctttctttctctcctctcagcacttgtagattttagaatctaagcccaaggagctgatgaggagtgaccatctggatttgtttccaggtggtgctaacactgaagagaagtttggcaattgtatgttcaataagagaaggtgtcaccttggtgccactgaatttttactactgttgaatgatccatcaattttttgcttccaagtgctaaaaaaaatatggtttgagttgccagcagaatgaaaagctgtttagccctgtagccattactgagtctcaggtctagactctgttgtctttatttaacctgtgggcatagaatggcctagacttgcttggatttaagtcttttaaaacctttaagttggctgacaaagattacccaagtgtttgcattggttagcagctctcaaacttagagtacacatgagtcatctacagggtttgttaacaaatgcagattcccaggccaaattcccaattatcgtcattcagtaggtctggagtgggagcccgggaatcttcatttaggcttttcaagcatttcctcctcatgtggtttgcaaacactaccctaaatttacttgagctcctcagacagtggctaccagattatatatatcttttctgtaaaatattttttcttagttttttaaaaggcagatacttgagctcatgtcttagataaatttcttttctagtcaaattttacaattcaaataatcttttattatttattagtggtgatatttttctgaatgccttccgaatggataaaaatctatttctatgcttcagtaattgtagtgcttaatgttttgtggaagtgtgtatgctgggattagttgatacatttagtagttttatgttcttgactttctttttttttattattatactttaagttttagggtacatgtgcacattgtgcaggttagttacatatgtatacatgtgccatgctggtgcgctgcacccactaactcgtcatctagccttaggtatatctcccaatgctatccctccccgctccccccaccccaccacagtccccagagtgtgatattccccttcatgtgtccatgtgatctcattgttcaattcccacctatgagtgagaatatgcggtgtttggttttttgttcttgcgatagtttactgagaatgatgatttccaatttcatccatgtccctacaaaggacatgaactcgtcattttttatggctgcatagtattccatggtgtatatgtgccacattttcttaatccagtctatcattgttggacatttgggttggttccaagtctttgctattgtgaataatgccgcaataaacatacgtgtgcatgtgtctttatagcagcatgatttatagtcctttgggtatatacccagtaatgggatggctgggtcaaatggtatttctagttctagatccctgaggaatcgctacactgacttccacaatggttgaactagtttacagtcccaccaacagtgtaaaccccatcgtctcagcccaaaatctccttaagctgataagcaacttcagcaaagtctcaggatacaaaatcaatgtacaaaaatcacaagcattcttatacaccagcaacagacaaacagagagccaaatcatgagtgaactcccattcacaattgcttcaaagagaatgttcttgactttcttagagctctgcgaatcaaaccatacctttgaaattctttgctatgcacaagcatttaatatatgtttaataatgttcacagtaaatggattaaatgggggcctccccaactatagtggatttgatcacaatttaaatcactagtctggaagatgcaatttaatcgtatttttccttcacaaagaatgcattcttattctttgacacaacagggattcatatttttgactactcagaggttttacaccattttagaaagagcacagtatatatctcaaaatgtaattttctataaatattttggaaggtacaaacttgatcaatggtttcaccctttctatttatctggttaattaaagaaatatttaattgagatgaaaaatttccaattggcactttaatcatggataattgggaagatattttgccatcctttattactaattggattatttcttccagttatcaagtacctattatgtgccaggcactgtgcaaggtacattttaggtactatttgtaattgtcacagtaatgcaacaaggtagggatcactgaggcttgcccagacagggtcacacatctggtagctgttcagagctgagatttgaactctagtgtaatggactcaaaatttcatgttattgtccttcttttccagtccagcatgccatcataaccttgttacacatatgtatttgtcagatttttctgggttattgctatataacaaacaattgtgaaacttcactggcttatggaaatatttttttcttgccccagactctgggggaacagctgaaacagcactgtggcagactggattgacttaggatctgatccacatgtcttttcattccagaacccaggctgaaggagtactcactatctgggatatgatgttctcaaagtgagaggcaggagctcaagagggctggtgcaaacttgcagtgcctcttaaagtatctattcaaaactggctcactttccattggccaaagcaggtcatggggccaaactcagcactgtggagcagaaaagaatattccttgttatgtcctaaatgtttgtgcacccctcccccacccctcatagctcatgttagaacctaataacaaatgtatagtgttaagaggtggggcttttgggaagggattgaatcacgaagattccaccctcgtgaatgggattaatgccctgataaaacaggctccagctagctcccctgctcttctgccatatgaggacacctagcaggcagcatctgtgaggagcaagccctctccaaacactgctggcaccttgatgttggacttcccagcttctagaactgtgagcaatatatttctgttgcttacaaattacccagtgtaaggttgtaaggtttttttttttatagcaacttaaactgactatgacactcctccaacaggggaaagggagagaggagtgaataattactgaacaatagaatagcatgacatagcacgtgacagctctcacaattgtcttcataagcttacattaatcgagcactgcctatgtgtaaggcactgcaccaggcactagtgacacaaacaggcagaagtgtaagaaatgggtatctgacaggtcagaatgcagatgcaagagatgatgctggtaacagtggcagcagtggttaacatctactgagcaccatctgtttgtgtgccaagttctgtgcacactgctttaaacagatggtctcattcagtcatcccaggaggtatggacagttattttcttttttttctatatctggtgttatgaggaaagactcacaggcccgtgcctatgcatttacatttacctttctttgcactgaggctcttgaaacatttctccagcatatctgagcacagaatgctctttattccaaatgttttgatagacctagcagagacttaggagacctaatgtacactttgaattcagatagacaaaccgaaaaggtatttgagacacattaattactgtcaagctaatttctatatattgtgaacagattattccaataataaataagtataactttataatcgtgttcagagttgggctaactctctcccatttgcctctctgatccattctcactcttctttctgctctgtgcccagaggctttttggccagtgggctcttttgctgtctgacatctcttggttccaccaatgggaacctaagaaagaaggagagccaggtcaggatattcatccctttgactctttctacactggttactgtgggctggatgcatccctccacagatgggtggaacagttccttgctgttactagccctagattacgacactatttttgttttgttttgttttacttctttaaactctgcccactcctttgtaaatagtctatttattaaatgttcctcattacccagtttgagtgtgccatctgttttctgccaggaccttgactgataaaatatttttcttatttaaatatttctaaaacagattttaagttttaaaatattttgaatactgatattttctagcaatctctactgcagtttctgtaatactgctttgatgtgttggtacatttcagtaccaacagtagagagataataattatccaatgcttttttaacaaggtaagaaagtgaaaccagaggactgtatcttcccatctaacttatgctctccacatcttttctaccataaaagaacaacttttgttttgctaaagaacctgtgtcctcagacagaaaaaagaggggtttggccgatggtagggtaccaggatctttcaagctctcaaacattgtgatgctgtactttgatcttctagagggagaaggatttatttcagctggtggccaaggaaagaataaaggcaaacaattgagtagcttttatttatttagttcaattgaagaactgttcactagctgccagtgctgagtctaatattctttgtccaaagcctctaatcatcatagtcaagagtgggtgagtgaaaaccaagaaatggaagagctgtattgtttgaaaaaatgaggagctctttgtcattgaagaaaccattagcttcagcccagatatttaaaagggtgattaattcctatagtagcatatctcttgcataatgtaatataatataaacttcctttgtctcatattcagaagcaccagaaatcatattttatcttatagctggttgttaatctttccaacttctttttcccaaacttgcctggcaacttctctttgacatgttgaggaataagacagatgttatttggtggctttggtttaattcatgacaaatccagactaaatggcatccctgtcctcattctttttttgagatgatatttttactctcgcccatctaaatcaaaagaggcttgttgcattttggcccaggcttgcccttaaattttccccatgagacctgagcaagcaagggagagaaatgaagttatgatcaagtgacagcagaaacttttcttggctctagactttttgaccataattatttgagagaaaaaaaataatgtttccctgaggagtcctgaacactccacaacattctgatgaactttgtagttgtcatgtaagccaggtgggagaaaggattagaagcttctggaaaataataaacagcatgtttttattactcttttcagcaggtgtcttcttcttgacctttttttaactgtgggctgagggcaatttaggttttaatagaggactgttggttcaaatctgtaattatgtcttcattgtgtatcaggcttgagctgctattgtctctgtataactagtaaatgataaaaataatgacagtcataaagaggtaatccaaataggttggcaaacctacaacctggaaacttgtgtggtcttttctctgtatgcaatcttccttttatatttaataatagacattttcaatggcttaccggcccatcaggtcagggtcctcatttctccagtgccaagtgatgctgtgttatttttatttcttcaattatcaaacagtgaaatttcagaagcctagtaagcatagattaccaaaactacgagatgattgcttcatatatttgtgactctccagaaggcagtgggataaatttattgcccttcatgacttcagatagcttgcatctcatttcagtcttctaagaatagttttctgctagtgttttgtacgcgcattgaaagatacttttatttatcattacagttggaagaattatagagtttgataaatatttatgtgatgccactacattcacaatgtttcgttgaaaagaaaatgaaatgaaaattaaaatgggctgtagtctgtatttttcacttgccagtttttatgaaagcatgtcttatcgacagacagaatctacaaagagttgtgtgtaggattcagttcaatttatattaaattctgggcattggtatacaagttattgaatataataggactctcaaaattttcccattggatgttgtaggacttagtggctcctctgggccactctttgtgattaaattcacagattttcatttgcataacatagttaatattctagttggttttaaaaagcagtatactggtgagaataatactgagtaagataacagattgaatatgaaatgtcttgaactgaaagtgattaaaagttgaaagaattaaaataaaaggccaagcacagcagctcatgcctataatcctagctctttgggaggccaaggcaggaggattgcttgattccaggagttcatgactagcctgggcaacaaagtaagatcccatctctaccaacaaaatataaaaataaaaaatttagctgggcatggtggcatgcacctgtggtcccagctacatgggaggctgaggtgggaggatcacttgtgcctaggaggttgagggtgcagtgagccatgtttgcatgattgcactccagcttgggtgacagagtgagaccctgtatgaaaaacaaacaaataaaaaatgaattaagataaaagtttgaggtacacacacataccctaaaagatatggcaaatggtaaaaaaacagactttgtagttaccttcaagatgtgtaaaacagagtttaaatcatttttatgattttttcttccacttgcttccttaaaagcctgcctctcttcctttcctccttcctttttcctttttcttgacctctacttcttccttctctcatttccacatttatcatgcacctgttctctgttgttatggagctttgcactgaagaggatgtatagatgatttttaattgcatatcattcctttattatactgatctggaaaaaggatttagtacagttatgctcaaatgaacactgggcctgtgtggcagggccaagcaactagaatatgattcagaagtcagtcagtgaaagacacacttggacaggaccaagaggcatttcactgccttgaaacaaggtgggggagagattctaaaatacacagcaggaggcactcctacccctcataggtcaaggagcttatcccatattggtgtgaagaatggcttattttctgatgaccacatgtggggctatttcaactgccatgagaaaccccagaaaggttagtgttttggattatttatatacactatacttctataaaagtaaatgtaacacatacactaaagtcaggattgatctcaacctgctagagccagctctctggggtgagggaggaaggagttgtttgtcacatcaccatgcaggttgcattcatcttccactggagtgactagagctcccaggcaatggcctgactctgaaaagcacaggactggctctaggagcagatcggctctcttgcgtctccttattggtcatggcttagcatggttcctccccacaagtccttagtaaacaaagcactggcaaaaacccaagtcactacctttcgactctcttggacaaggagagctttttctcagcttggactgagaacctgtgccctagaagcattattctgactaggttgtaaagagagaggctacaggagacaaaatggctaaaatgaaaatgggagccactgatccccatctgcagttacaacttaagatgcttacagatgtggtcagtgtgacatgtccaggagggaggtgcacagggggatgtgacagacagggagggtgctcctggggacagtagcttgcccgccagccctcacttcttggccttaccctcggcagccgcagcttccatggctttaccgatcatcccccaagaactgcatgcgcctgatgggcttcaagtccttgtccaattcatagacaatgggaataaccagttgacaggttcagctccatgatagcctcttcagagaccttccacatgcttgacaatggttggaaggctgtttccatgggctgcaatcagtactcatttcccctccttgatctggggagctatttcttcattccaaaagagtagagctctggtggtagtgtccttcagatgctcacaggaaggtagctgatcttcagtgaggtctgcatacctgccatccttactgatgttgctgtagaaaggatggttgggcttcattagaggtggtgggacatcacaggtgcacctccagatctttacctgggcctcgccatgctttgcagcagtttctgctttattgactctggtcagacacccatagtgcccttattgaggtgtcaagtcctcattactggcagccacatctgatcaataacatctagcactgtccggacggtccagatcactctcttctgcactgaggtgaagcaggtgtcaaattcagagccagcgtctcccagtgcctgcctgtagcactttgccttctcgtggcctgctgggctcaggttggcattgtaccacccactgaagcagttctccaggttccacatgctctctctgtggtggatcagcaccagcttgtaggcagccatggtggctgtctgggcatgtggtgccaactggtacagatgattaaatgaagaactggtagtagaggctgggcatggtggtgcacacctgtaatcccagcactttgggaggccaaaacaggaagactgcttgagcccaggcattcaagatcgacctgggcaatatagtgagaccctctgtctaaaaataaataaattaattaaaaaataaataaaataaataaataaggtgggcatggtggcacactcacctgcagtcccagctagtggggcaggggagggctaacatgggaagttcacttaagcctgggaaattgaggcagcagtgagctatgatcatgccactacaatccagcttggatgacagagtgagaccttgcctccaaaaaaacaacaacaaaaaaaaactgatagtagagacagaaaagcatgtaatctaattgtacaccatgtggtacaacataaatgagtgtcttctactgatcattcatcatgttccctgtggccttaggcccatccttcggcattgtgggatgagttttacaaattccaattggagacataacagtatgaaggataactagagcactgaggtgagttgataatgctatctaagcaagggttaattgtcaaggaatgcctaatcccagaaatgaatcccagttttgtggggcttgaagttcatactattgcgaatgcctgctttgagaaaaagaataagttagaagaacaaaattgtgtttgtttagaacaaggaaaacaatcacagcaacttaaaagtttgaaagtcaacaaatatgacagataccacaaaactcagaagaataacatagtatttttttaaatgtctgacacacctctctaatgttttttttcttacatttttgggttgaaattttgcttgattgcctttccctaggataacaattttgtaatcattgccatagaaaataagaaagattatttaatttttctccagtgtggttgactgaaatttgtgttttttattattgagagtttagaaccatttctccaaagtcacaacttgttatttttaatgacatgccaatttttaacattgtgtaaaatttggaaaaacttctatcaagtttctttttcatataaacttttacagatactcttgctattaataatactgctgcaagtctgtgttccataaagaacaacaacaaaaaaactagtaatttctgtgtctgtgagttttgtcaacaaaagaaaaaacttacagtgcatttttaacttgtatgctgcatcatccaggagagaactttcattttgtctctgtatgcaagaaccacatcttctagtgacaagtttacatgtctaatcatttggtagttttccacagagtagcttctggctctgttcattttagcctaatttctcctccaaaactgctgtaattctagtgccacccacctcaggttatattcatatggtggtaccagtttttgtcttaattccatgctaaaatgctgggtgtctcagtgcaatggatagtgggagtggttttggaagccatttctacactggaatggctaacaacagtatgtttgtgtgtatacatatatatatatatacacacatacacatatatatatacacacatatacacatatatatacacacacacatatatatatacacatatatatatacacacatatatatatactgttgttagccattccagtatgtgtgtatgtgtatatatatgtatggaattgaagatgagtcatataaataatcccactaaatgaaaactaaatgtatcctcaacttaattctcttttagacagatctctatactggctgcaaccacttcacctaatgtgatgtaaaatgtaatcaaggggaaagagaatagaaattttgaactgatgcggttaaaatatattttgcaaaatttataaaaatgtaggacaatgtgaatcattgttaggatcctccctggggcttggaagtgttggctttaatagcttcatgttaaatctgcatctgcccagcattactggtaaatgaacatttttctgaaagaagtctttaatgttattgcaggaagtgtttgagctgggccaggccacaaagtctagtcctgattttaaggttgatgccaaagaaacctggttagaccaggttttaggttgtcacttctcttgtatgttactgaaccaacagacaaatgttgcaaaggacatagaccaagtttgtatgtgagtggatctggctctttggtgtctctgtatcgctggaggaggtgccctggaaattctgtagccaaagcagcctttgaagaataagaaatctgcaaggtcttggtaggtcaaggcgggcagatcatgaggtcaaggcaggcagatcatgaggtcaagagatcgagaccatcctggtcaacatggtgaaacccatctgtactaaaaatacaaaaattagctaggtatggtagcacacgcctgtagtcccagctactcgggaggctgaggcaggagaatcgcttgaacctgggagacaaaggtttcagtgagccgagattgcgccactgcactccagcctggtgacagagcaaaactctgtctcaaaacaaaaaacaaacaaaaaaaactgcaagttcaataagtatggagctttggtctcactgctttttcggagcagttggctgttgaaagaattgcattttttcttgggcctactccttctcataaaatatctttgggaaatcacgagtaacaatataccagtatccaggaagcacactaaaagggcttttgagagctgcgctaataactgtcccagagttctttcactcagactcattctccatattctaaaagtgtaacttgagggatttccctaaattataagaagtttcaattaatcataatatgcacattattgttgtaatttactataaataatctaacttataatctctatattagtagcgtatcttagaatccataatttccatccctgtgggccattggtttggtgggatgtttctgatttcattgactaaaccctagataaagcaccatgattcttaaaaagaaacattattttgaggttggctttgaaaggaaattctttactcggtctatccaagtatgagatccgaggttgtgaatggggctgtgaagatggaaagtaaggttagtctccttcatgcgtgttggtcctctgtcctcatacgtatcacacatctctccccgatactgggtagagttaggtatttctttcttacaccttgaggatacttctaatagaatatttggttaataaaggaataatgattaaactgaattagccttgaaataaaaacagttattaaatattggataaccattttatacaatactgctttagatgctaaaatatcacatgtactctttctttcatctgactgctaatttatcctacactgatatttatcctagaaggtaaaccatcagaaatggagtgagtttgagtttggtttatggtcactaaattcttgtgtttcacaactgagatactgtaggtgctcaagggtgattatgctaactcaaaattctgtattctgtaggaatacagcatgactcaaacatagataatgatactttagctcatttagaacttcataatttggtaaaatatgttcaagaaccaggatgtaagcaataatggctattgggagctttctacagagtttgcactaatatacattaactctgtggttttcattcagtccctacttactttcactttgcacacaattctaataagatggatttcctgatatgtaatcctatagcattttagaaattgcgaagtggagatattgcaaaagatggtcatacttacagcagtgggaaataaccccgtaaatcaggcagcaggagaaagagttcactaactctcattgtgtgtttttctgtgccaggtgttaaataagtattgacatattttcttttcataaggattctatggggtatgtactctgattatccacatattatggatgagaaacaaaagcttgattttaaatttcttgtccaaggtttcacagcttgtggtggagctgagatttgaatgaggtaggtcagaactagaatctgaaggcttaatcttgggacttcagacattttcaggataaacagccctaagtacctccttaggggctgtaagcccaggccaggtagtggcttatgcctataatcccagcactttgggaagcgaggcgggtggatcacttgagtccaggagtttgagaccagccttgccaacatggtgaaacaccatctctactaaaaaatacaaaaatcagccgagtgtggtggcgcacacctgtaatcccaactactcaggagactgaggcaggaaaattgcttgaaccctggaggtggaggttgcagtaagcagagatcgtgccactgtgctccagcttggacaacagagcaggactctgtacacccctccctgccccgcaaatggaggctttaagcccaaagagctctcatcacttcattcattcccatgcagcataatagctaggtgatgattgtaatgaagttgggatcattgtcaaggcccaggttccctagaaaacagaacctaaaggaaaagttacagtacatgctaatgttttactaatcacaggggagcaagagtgaggaaaaagaagtcatatgggatgaaatggagaccacatataaattcgtgtgtttttaagttggtcacagcttcacaacaatactcagcctgttttcagttgctctgcctgtctccagagagggcactgagaaccactctattttggaccatttacctggagttggaaggaagggtaagcagtttctctgctgcctcctgcccatttctggccttttattggtcaaatctgccacatagaccattaagtcacaaaacttctgggaagtactagtgggaagctagtacttctgtgggtaccatctggtcagtgttcacattactatctgtcttttatcaatgagtactggattggggggcttccttattctgtggtaggaacagagagttcttatcagggagtagggtgaacagtcgatgtttaggtgtctgtggtacaggttggcctgagcagatctcggtgttgcacaaactggacctggaaagagaattgtaatgcactttggaaagattttttaaatcaaaaatagaaaattaaaaaaacaaaacaaagcccataaaattatgatgaccatctgacaggctgctcaactacttggaaaactgaagtgtgcaaaatgacacatttcccaagggttctggtttatcaaggttttgtgatccctctgtctctggaacctggactgcttagaactacaaagaggaaaagtagcagcactttgcgttctttgattgacatgggcaaacaattttttttttttctgagacggaatctcactctgtcacccaggctggtgtgcagtggcgcgatctcggctcactgcaagctctgcctcccgggttcatgccattctcctgcctcagcctcctgagaagctgggactacaggcgcctgccaccacgcccggctaattttttgtatttttagtagagatgggatttcatcgtgttagccaggatggtctggatctcctgaccttgtgatccgcctgcctcagcctcccgaagtgctgggattacaggcatgagccaccgtgcccggccagcaaacgattttttaaaaattacccatcctttcttgcaagtatccgaagtcagagtgctattttatggaatgtacgtgtatgaattcatgagctggaaattgggagggaagtagaggggctgaagtgaaggagtttgggaatttaatctgctggacttatttttccatcgtccttcctagtcacaatcatctttacttcctctaccttctcctcttccttagcaccatcaccactatcgtctagtacttactgagagcatgctatctgctagatactctgtaagttgtttaatgtacttgagctcattcatgcctcacattaaacttatgaggtaggtactcttactgctccagatttgtgggcatgggaactgaaatttagagaaatgaaataatttgcccaagtccacagaactactaacagagccaaggctataactcagcctcgtcaaaatccatggttctatctcttgtcccgaccacatactcctcttggagtaggtatgtttggatctttttgtgcacatttttgtgtctaccttgtgcattctattttctcatgtgcctttgttgttaggagcttaaagggaatatctgtaatattcatgtattcattacaatatgtattatatattatgcaatatatagtatatactgttataatgaacgcgtgatgaactcctacagtattctaggcactgagttaaaagagtgatccaaacaggcaaaaatctttatcctcgtaacattctgtattaggcagggtttccagagagacagaaccagtggagatatgtatgcacacacacacacacacacacacacacacacacacacacacacacacacagagacatagatagatatggatatagatgtatgagaggagattaattagggggattggctcatgtgataatggaggctaagttctatgagagtccatctgtaagctggagaaggagggatgccggtagcatgggtcaattcaagttcaaaagcctcaaaaccaggggagactatggtataactctcagtctgtggccaaaggactctcagacagagagagggagagagagagagagagagagagagagaatttgctttccttctgcctttttgttctatctgggtccctctctaggtgtatggtgcccacccacattggatgaagattaatcttccttacttagcccactgactcaaatgtcagtctcttccgaaacaccctcactaacatacccagaaataatgctttttcacctatctgggtatctcttaatccagtcaagttagcacctaaaattaagcattgtatattctagtggggatgttgcacttaaaacggtctaacatatcacacattatgcatgttttccttgattattatcaagtgctaagcagaaaaataatgcaattgaaggatcaataaattgtacaggtggtggtgggttccaagaaggcctcactagggagagacaacctctggataaagtcctgaaggaattttagttttgttacctggtattttaacttgcaggaaggcaagaaagatggagaataagtttgactgatttgccacaaactctgataactactctttgtgatttaaaaacccactatgaactgtaggaagaatgtaatttgaagtacacaattataaatgcagatttgttaagcatagaagtagcctgtttaaaactatttaagagtgaatcaaaagtcgtggtgtaaatggaccccatctcaaacttcccttcactccatcatgcctgtaccataagaggaaaaacactacctccaccctttactgttgttaattgtatgcatatatcccatcttccttctgaaattccatttttctgaatactgtcttacagcagtttttttttttaattgtacaatgtaacatccttaaacatgacttaaaattgaactgaagagctgctgtgtcaggcatgttgtctgaattgctggacatggagctatctccctggtttagaggaattccattctagttgggagcataaaacattcacgcagagaaagtggtagtatgctgacctgtttaataaaacatgcgcacacacacacacaccatacctaaattagtaatcgtcaaataattagagtaatttaatatatatcctgttaaacttattatataattggatttttctgagacagggtcaccctgtctctgtctcccaagatgcaggctggagtgcagttgtggggtcatagcttacagcagcctccaactcctgggctcaagtgatcctcccacctcagtctcccaaggagctgggactacagatgcatgccaccaccctcaactaatttatttttatttttatctttgtagagatagggtcttgccatgtttcccaggctggtcgtgaactcctaggctcaagctctcctcctgccttggactcccaaatagctgagattacaagtgtcagccaccacacccagtctagaattggattttgtaaaaagtgtttaaggattctttggaggcttgagctcatgcccatggttgacatttgaggaagatgagacttattttcccttagccccagggatagtcagtggcacaactgacccttgaacccaggacttgtaaacatgggtactattttgttcaaggctgtcttgataatttagcaggtgcatttgaggtcttaggttttcatttttagctgtatttattactgagacatggagttactgacatggctgtaagtaagcatcaccttttattagatgccgatgccagagttgactttgtttgcactttatacttatattgtgagatgtttggtgaccatcctttatggtattttacaacttagtagttcacattttgttgtttactgacctaaaaaaaatcatagctaacatctgaagcaaagatgaaagcacattttcttttatcacacatctctgcttttactcacagaactctttaaattaggtcattaacatatgcaaacacttcttttcccaaagtgtttttctactctgcaattattatgttgtttttggtaagataaataagccctacattaaaacgccagatattaaaatgagaaacagtagcactttataaaatattagaaagctttgaaaaacacaaataaatagaaagcatccccttgtggcttcaggtagtgcatgttaaagagtttgtacccctgtactctgtcttcctgtgggctgagtactgggatgtggcaaagtctcccctggaattgactggcagaccactttgctgggggtggatggggaaagagaggcttctgcattcttttgtcctgatcaaaccaaagcagtttctccagctgtgaggtcaagtttctagccttttagtaaaattaaattgtttgctttgtctgatatcagttctggtttcagacagagggaaataacagtgggaaagcagcctgtgtggggaacgcaagcaaatgtgctgtgggctctcagacgaatagtgaatcattctggggatctcacatgctcacttaacatgcagagcttggtaaccagcttaagatagatgacctgtcactttcaagaacatgtcaactgtttgttgcaggggaatatttcctagtcggttcatgggattcttaataaagatgttggaaccagcagtcctgctgtgtttcagcttctaaccagaagctgaataaaggtcagaagggttactgcccctctcaaatggatcccagaatccctcactttggatagtggttgtggttttatctgctttggtgtttgttgttattattttctgtcttcttagtgcttctgagttgctcagatttggcaaattttgaatagacatatatatgaaccccaaataattgtactgagaaatgcagaaaatattgagcaagacgctgctgaatttccatgagtaagcaaatatattctaagagctcacaggtgaaaatttctttttatttaatatgtcatttttattggaaggtaatgattatgtccaggccataaatacagtgtaaattctcttcaatagacattaaaaagatgactttcaattggaagcagctttttaaagggcttaaaggatactgaggtataaattttcagacctgtacagtctgtacgtgtaagactaggaagaaatgagtgaaacccaatacaggctcatgcatgggaacacatgtttatgaccataagctgtagtttcacaaaacatgttgaagaaggacatataatggacgtataatggctaagagttttaaatgtattgttgtgtgtgttagtttatagttataataaaaatatccaatgggttatcagccctatcatcatttttcaaatgaggatactgaggtgtgggataatttcttaaaaatagagctgtgcttcacaaatacccaggaaataaacacttgttcagtcactaagttctgactccatgttgtgtattttgtctgtattaagattctgttcagctgcccagataaaaagtgataaaagttttctagctgatattcctactataagatatcttactgtctgtttccaactagctctgaagggtcagctagttttattagaattattgagcatgcccaggatgtggttgtataggctcagcttaaatttacatcaattggcaatactttctcttggttcaggatcagctgtatattcctctcattccttatttctgcctgattgtaggctccttgaaggcaggatttatttctgatgcactattgggtcctgtgtctggctcagtcagaacctggcatatgatcactgctcagtaggtatttttggaaggaaaggaaaagaaagaagggctagctatgtagatgcaacagcagctcagtgtctatctctgattcctttccaaaggttaaattagatgaggaagacacgttttctgggcatcagctttacctccgagtacatgggggatctgttccagtatctttgttcttttgtggttcaaagctttgaataatgtatgttttgatgaacaaaatggacactgtggctctatgaagaacttaactacaaatactgcagtttgtgtcatttttttcagccatttaaggtggtgtcaaaaattacagtagcttacattttaaaaaatatttgacttttaaataatgttcactgtgtcattgaccctaggaaggattttagcttacatttatggcttcttactgctactgcaatagagccaacaaccacagatctgcccatcactttcttataaatgtggttatttcagatttccagtgtgttctggtcacctggcttgctcttctcttaaaatgtgtttaatgctctcttggccagtggttaggctcatacttcttatatttctattatccaggagactttatcatcgagatagttataatctttcttctatttttcattaaggtcttataagcctattattggtgctgaagctcaccaagacctccatacccttgcctctcttcagcaggtgctatctcttataccccagttggaaatgtaggttcatttcagacagcagttttcacataaggcattatatactattttaactatatcaagggccttgattttcaccatcctcttaaagatttttaaaaatatcttcattctgaagtctccgaatttttattttatatgcattgacttcttctgttatttccttgcaaaaatactttggtgtttgtcttagtccattgggattgctataacagaataccataagctgagcagcttataaataacagaaatgtatttctcacattactagaggcttggaagtctaagtgcaaggagccgacagattcagtgtctggtgaggacctgctttctggttcatggatggtgctttctggttatgtttttacatggtggaagggatgaagcatttttctcaggttgcttttataagggcactaatcccattactgaggactgctgccctgtgatctaatcactttccaaaggccctacttcctaatattatcaccttgggggttacgaattcaacataggaaatttgggtgcacaaaacgttcagacaatagcagtgtttttcccatttagatctttggccttgtcatcataccccctgccactcctctctccatatgctttctgtaagaaacacttttccaacctctttaaaaatattctgttttcctccttcagcttggaaaaccaagttttaagcttgttccacaagtgattttgtgctttataataagtgagttattttacatatagcacaaagcacattgcctagattcttatatatttatttcacttttctcgatccaaaatacattcataaatttgaaccacaaaagcattaaagtgtcaaacatttctgtatttgccaagccatagctttgtttctcttctggaaggtagcagaagttacttttgatggagttatcttttttgactggaccaggaaaaaggcccccatgatgatgagcaggaaagcatcttttctatctataccaggcagttctaaggtaagccagaccaaagcagatgattctgtccctgcctccaccaaaatcactgttggattgtagatgagaagacaaaatgacttaaaccttggactgggacaattcattttctgacagctggaggctcttatgaacaagtgagaccaatatttgtgggttatcttggatttggcgtactcatctcttcacagtcaggagcagtcttcagagatgtgatcaaaaacatcattaagtactagggtgaaaaatccatctttttacatttgggtttgaactttatgtttgtcactgtttcagaattgctgaaattactagaacagggtctttggagtggaagaattttggtttcttcattctatccaaataagtacagaagaaggtcaacaaggaatcaggccatagtctggaagactgatatcccagagtggctgtgaggtagatgaggtaaaaaatcaacctaaagggactggttaggttctgagctggaagaatgtttggaggaagtaaccgtgagagacaggatggatagttctcttgcttgatgatgtcgttgagtcagaatgccatcatgcaaactgattcgtgtgtgtgtgtgtgtgtgtgtgtgtgtgtgtgtgtgttcaatgaaggataattgatgttacgttttataacagggattttgtgtgaggaaggttaaatttgaaaacgaatgcgaatgtactcaccacatgactgagtgtctcccaccttcaagattcccatttgcagttgacctttgacattccttgtgcctcttgctaatgcttggagtgaacactttggacctcgtatgtgaaattccacttgctctgtggttctcagtgctttgtggtctttaatcagttctgtatgcctgccctgtcttcctcttccaagacaacaagacttggctgtcagcttgatctgtccattgtagtttatacagatgtttcttttgtttttgtttgaacgccctcaaagaaaccatgttgactgtgctccatcacatgaggcggtgcccatgtgtccttcatagtaacactgtgaggcataattatccacacttcagagataatacacagccaacacaatttagcttgctttatagagctgaggcaaatcatttcccctcaccctcaggccagctctctagtgagagattacctcttggtgacacttcagtctttggtttagcagctagaattcttttatagtttgggaaggatatgggatcacatttctatgagtgggtgctggaatatagactcccatttttcacccttataccctcagttaacttctctatgtgagtgagcttctgatgggataaagtctttggagaaaccttagaattctggttttgtttttgttctattaaggtcaaactcacatagtataaaattccccattttaaagtgtacctttcagtggcatttattacattcacagtgttgtacaactactacctctatttagttccaaaacattttcatcaccctaccatcacccatacccattaaactatcactcctcattctgcctcccctcattccctggcaatgaccagtctgtttcctctcttttgtttttgtttttataagaatagattatagccatattaagaatgagatgcaacttgactcatttatccaatgactcatttatccagatgttaaaagagaaagtaagaacttaggcactggaacttcttttatattcttatatatctaggagttgggccaggtgcagtggctcacgcctgtaatcccagcgtttagggaggccgaggcaggtggatcacttgaggtcggtcaggagtttgagtctagcctagccaacatggtgaaaccctgtctctcctaaaatacaaaaattagctgggtatggtggcatatacctgtactcctagctacttgggaggctgaggcatgagaattgctcgaacatgggaggcggaggttgcaatgagccaagatcacgccattgcactctagcctgggtgacaagagtgaaatcttttttcaccacttttttttcaccactccttccatgtggtgggtgcattcacatttgttttcaaatttagcctgttgtaaaacgtaacattaattatccttccttccgaaacacctttgatctgacttttaagaaataaatagatatatttttgtttaagcaggtatataggtagttaaaatataattattcaattaactttttcattttaaaatttgggattttttggtgaattatattaacagtccaggaaaaatgaaaaaattattaattactatcctattttaagtacttcctttttttcttaaagggaaatatttttgaaatgttgattgaatatttatgagacgatgagtgtaccaggtgttaaaaagaaaatgaaggaaatatgagatgtctttttctcaaacattggtgggtagtttttgtcctttcagcaggatttttgcttcaagagtttttgttggttcttcattgctgcattaaagttactttcagagggctaaatctcataaaatgccaggatatcaaggagaaaattgaactctggctcaaatcaattgcatattatgttaggagagagagacctcatgaaaatgcttcatgttaaggggcaggagctggattttcctttgattccggattttaatatcaactgtcagtatttaatagtaaaaagacatggcttcacatgtatttttaatttcctcaaatttgaaagttgcgtgagtcttaaactggcccttagaagtggatttcagaattggtgtttaaaatataaaattcacagaaactcctagtggggggtcagctggagtgtcattttcaggaataagcaatatctatattgttttttgttcaatattttgtacagttttcatttggtaaatctggttgttattaaagtgacaaagctaatggaatcacctgctgaggcgctgtctcccaggaaggcacctctaacaaaacctttcctttcctgacgggagatcattatgagatcctgcctcgtaagagggacccctaaaggtagatctggaacattcctccatcctacctgagtgtcacttggctttaatccttctgccaccatctagatacccatcagcctccagcttggattcctttcaaaagatacttagaaaaaaaagaaacaactttcaggttttgctaatcttgagatatctacagttctatgactttttccatgtgtgtatagagaaggatgtgattgtgttccagttcaatctgtcttaaagagtggtccgcatggagtcagcaggtatgggtaggccaggcttctgcctttttaaaatttttattttcttcaaattttattttaagttcatgggtacatgtgtgggatgtgcaggtttgttacataggtaaatgtgtgccatggtggtttgctgcacagatcattccatgacctaagtattaagctcagcatccattcgctattcttcccgatgctctccctacccccagcccctgcctacaagcctcagtgtgtgtcgttccccaccatgtgtccatgtgttctcattgttcacctcctgcttataagtgagaatatgcagtgtttggttttttgttcctgcattagtttgctaaggataatggcttctaactccattgatgtccctgcacaggacatgatctcgttccattttatggctgcatgggattccatggtatatatgtaccacattttctttatccagtctgtcactgatggacgtttaggttgaatctatgtccttgctattgtgaatactgctgcaatgaacatacatgtgtgtgtatctttataatagaatgaattatactcctttgggtatatacccagtaatgggactgctgggtcaggcaccagcattccagatgattctaatgtaggtgatgtgcagaccacagtttaagaaccactgttctagcccctgaaatcattttgggcctgattttgtcccacagtgtatttgttttccctcccagttttgaagcatgtgaacatttggctagaaggccatgacctaatcccagccattaggaaaaatgttgatggatacaagagtgaatcagagccctgaggcaagccactggagacttctctccaagttgacactctgccttatgaatactgaaattcaatccgttttaaacccctttctttggcttgtcatttggcccacatttttcctgtcttatcctccaggatctcatgagagattttgtcaaatgccttgctgacatccagatatgccagatttgcagaattaccctgatgtaccagttcagcaaacacatttcattttttttaaaaggaaagaattaaaaagagtgagagagagagaaaggaaaataaaatttaaaaaggaaaagaaaaatgagatttaatttggtgtgatattccttttcctgctaatccaaagatataaatttgaacccacaattttttttttggttatttcatctggaatcctgagattataggatatatttcacagtagtctctaaagctcagcaaagaaatccatgtggattttccagggaggtttcccctccccaaaggaacatgtgcagacttaagtgtggtaagtcattaatactagcctccttctttgtgtgatgggaagcgggtggtcattcaccctcaagcagtgattttttttgggagcagtgcagagaggggcatttccctgtataaatctgaaggcttcaaagtggtcacttcataccatctcattttgagtcagaccaccctcactactgctaagaagccttaataagtgtgtctgttcttcttgtgtattggagaggaaacaggtagagagttgttaccctaaagagaagggaaaattctttgagcacatttgaatgacaaaattatatttctcatcgagtttctttttagaaaaagggaagaaaatagatgtgtcttggaattctgtccatgagaccacagaaaagaactttgactcataacttctttaagcaaattcctcccccagccctttgccccatgatgtgttgattcattgtgaaaatctaaagcaaaccaaatttcagcacatacagaagccagagtagtcagcatcagggagatcatgcactgctatcatccctggaagactgatgtttcaaaggctcagctaatgtgcttcctgatgtacgggttaaaaaagtgggagaagcaaattaattacattcaaaaggaatttaaaggagactaatcagtgcagtggaagagaccaggagctgtttacagatgtgccaagatgtagagaaatcagtattggctttgtctggaagaaggagtggggctcctcttctctagctaattaaagcaagcttatctgtaaatttagttattcataaagcttgcttccacggagctgctgtttttctaataggatgggaaggctgggtttctgtaaatgtgggtcagtcatgtgattaagtgacccagatttccgcagacaaccaaaagaaagagcagagagaggatgtgccagctcctgactgcacagcacagcatgggcacacctaatgcctcctccctatgctaaaggcagagattgaatgtgaatgttttcacttgaaaattgcatcatagtattactcctataagaaagcagcaccaagcatcagctctttctatttcttttcaattacttctctttctacagtcaggaagagaccttttaagcatttaaattacggtacatctttaaatgctgtagctatgtttgagttatctggcatcccaggaaatgggctggtgtttccaagtgtccgtaggtagagagtctagaagtggactcatgctgattttatttcatttttgagacagagtcttattttattttatttatttttgagacagaatcttgctctgttgcccaggctggggtgcagtgtcacaatcttggctcactgcagtctctgcctcctgggttctagcgattctcgtgcctcagcctcccaagtagctgggattacaggcgtgtaccaccacacccagctaatttttatattttcagaagagatggagttttgccatgtttgccaggctggtcttgaactcctggcctgaggtgatccacctgcctcggcctaccaaagtgctgggattatagacatcagccactgcgcttggctacctcttgctgattttagacacctcatctcatcagcattttcttatctgtttttacattttcattataatgtagcaactattttcattgcatggtcagccagttttttacctcttataaattatattcaagattacatggtttactggaggaaaagtagaaaacatgaatatgcaaaacacaaaagaaaataaaattggtcaggtgcagtggctcagcctgtaatcccagcactttgagaggccaaggtgggcggatcacttgagtccaggagttcaagaccagcctgggcaacgcggtgacaccccttctctactaaaaatacaaaaccattagctaggcatggtggtatgtgcctgtagtcccagctactcaggaagctgaggtggaaggatcgcttgagcctgggaatttgaggctgcagtgagtgccactgcactccagcctatgctggaaagaaagaaagaaaggaaagaagttaaaagtgagaaaataaactcatcctttctaccaccactcagaaataaccattcttattattttgggtcaacaaccaagaggcagttttgttatctagcttgaaatcacagctctgtcactgttcagctatgggatttgggcaaattacttgatctctttgtatttcagttgccttgctgataaaatatggacacctacctcaagaaaatgcctaggaacatatacaagacttcaaacatagtgaacattcaataaacgattgttgaaaaagacattgaatgaatgcatacatgaaacgtttcccatgtagtataaagttgttcatgtatctggtccctagttcattgcctactgcaatcataaaagcataaaggaacttcacccagtgcgtgagcaataagtacattataaatgttagttattattattgcctgacacatcattaatattcattagatagttgttgaatgaatggatgtcagtcactgcccttgggtagtttaaacttgagagaagacaagagaagattcatgaaacaataaatacgtggtgagccatttggtactcagtttgaggggagagctccccaggggctgttttatttggggatttccttggaatgttcagctgattaaactgctcccattacagcttgagtgacactgggtaacagatctgggaccggatcctacatcatcccaccacgtaagtggactatatcatgccttcattcattcatcttttcccattccttttcaacaatgcttactgagtggcaggagctgtgtgggattctagacagccaaagacgtttgctgttgccaccgtcttgttaggagatctgtggctcagaggggattcataatgtactgtgataaatgctatgagccagcaatgcccaaggattatgggagctagtgtgtgtgtgtgtgtgtgtgtgtgtgtgtgtgtgtgtgtgtgtgtgtaacagagggaaggaacgtcagagcgtcctttccacaaggaggtccagttggaaccaggtccaaatagagaaataggtattattctaaaccaggaacacaagagtagcatttgcaaagattaggcagagtgagagaactgggaggtgcatacagcatggctagagctctgagctgcagagaggcacgaaggttctttcttttagtggtgagtgggagtggttacattaaatggttttaaagctgggagtgacaagatcaaatctgcattttggaaaactagccaaaatctgtgtgtgttgcagggtgaaggaaaaggtggtgggatagactggggccaggaacactagttgttggaaaccagaaagaagggactgaagtaagggtaggggagaagggatgaattgaagcacccaactcaagatattagggagggacagttcacagaatttgttaaccagtggttgtgtctgtgtctgtgtggctggatgtaggggtaagtgactaagaaggaattaatgatgcttctcaagtttctggcttgttgtggtgtgcatggaatggtgagaccttttatctagattaaaaatataggagacagagaaaggttaaggcgagaagatcctgtataagtggattttgatgagccattgacacatcaggcagagcttctgaatgggagtggtgctgaggaggaacagcagtggaggagaagctgggaagcatggatttcttcatgcagatcatctcctacttgggtcaatagatagctcttgattttaagtagcttcaggagctaagttctatcttcttagagtaattgtcctgtcaatactgaaccatggtatactgtccttgttctaaatacagtacaaagatcttttctggcacagggacttaatctgagctactaatttccattttggggctttttgccaggctatttgaggcagcatttagaagcagagaaaagtagattagcactgactatcattttttatgtttagactccaagctgataaagcaatgacatttttattatttcagcatggttttgtggatgtgtcacaattatttatatagtttttttttaggtaaaggaaattaaattatttgaggaactgtgccctcaccttgtggctgaatctatctggtgctgctcttccttctcctttccctcactcccttacatggtcaggtcattttaaatatgtccagtcttcagaggagatgcctcctgatctcccaactatcactgaggggtggaaggtagtgcttattcctcatttgtttgatagtgctcaacaccttgggttaagatctttcctggaagagaaatggtagggaagcaatatgcaaaagatgaagacatggctataatttaattcttaattgttctaaagtgacgtatttcagacatagcaggataaagacttgggtacatgtttcaacagaatttatttaggatttaatattttataccagatgttaggatttccttgtggagggataagggattgcatgtatataagcaacagggcctggtagttctgacctgaagaagcttattcatttcctggggaagatggattttcaaagaaatatatgcaaatcaatgagaaaagtactataataaaagaatatccaaaatagtatggagattcagagcataactgcctggaaaatgctaagaaattctttacagaagaatgcttcgtgggaagtctataggcttgtctgtcttgtttggaccagatggcagacttgttgaaggtcatgtccctttccctgaactggactttctttccattttatctgtgctgcttcaaatgcatttgttgcttggctttctatggcagtttcttaggcataagtctttttcctatactctcctggaacatcttcagggcaagacccctgtttgttcagctctccatcccctgccatacccagtaggtgccatagcaacacatgaaatcttacattttgttctcagaacagcactgtaacattgatgttattattagcaccatttttaaaggtaagaaaactaacacacagagcattgaaaacttttctcaaggtgtctcagtcagtttgggctgctttaacaaaatgccatagactgggtggcttaaacaacagaaaatggatttctcacagttctggaaactaggaagtctaagaccagctcgtagatgagtttcttgggaacctggcttttgcccataacggacctaacaatggtgactactgttttctgtcctgatgtcaggctaagtattcataaacaccttgacttgatgtttacaacttcataaggtagattatttgtattcttgtttaaaggtaagaaaataagttggcaaatttacaagtatggaggaaaaggcgtacatgcaaggaaagttaaacaaaaatagatttaaatggtaaagactaatgatattagaatatcttaaggcagaacggacctagttgccagatgcctggtacttaacaataactaccatttattgtgttgtatggatgtggcttatttttggtgaagcactttacaataatcttcacagtagcagttagaagtgaggaaaatggacttttccttttactgataataaaatagaggcacagagaaggtaattgccgatgatcacatgagtgtcagggtacgtgtcaggtctgtttccactatttattcccttaaatactatggaattagagcaacgtaacacactgagatgttaaacttggagtttttcttttttaccccgtcttatgtatggtctctgtctaatcaaccagtgtcttcacattaccttgtggaaaatcaggggcattttaggcaggagcagagtaggtgggaggcacgtctgtagaaaagcagtggaagcaaaagaaaaaagcctgttttttttttaaactttcaaaatagactcttgaagtccacatcaaaaatgacagttttaaaagcaaagtttttgatcttaagagctaagttttgttgagagaagaaagggctcctgaaataaaaaataaagttcttgtaaagtcaggaatagagtttatgccataatagattaggaaaaagactaaaggaagatctaaaagctttcctccctatataatcctcccaagactaggatccttaggctggtagaaaaggagagttaggtaggacttgagtagggagcagtctcttgggctgctgtgatgggactgggcctgggctaacccacagggagagaagcaaagcaagtatggagagtttgtccagcactagccatgaccatctcagggcacccagcctaaacctattctccttcacttttgaaatgaacatctgaagtcactggggtcaaggagccatagtggttgctcaccatcacttaccatgccttccgaggatggatgtctgcctgctgctaatggattgaccactagaatccatagtcctcccagtgccccaagattgtgctgagctttgacgtgaaccactaagtttgggcattctcctttttctataaggagaatgaggaacaggattgccctgcaaggaaaaccagttcttgtctgagtgagaatgactattcaaaaggagaagtgaagaatactctaatatggcctcctggagcaggaatgaccaaaacaggacctccaggaatgggtagaagctgggaggactgagggtgagaggagcctgagaggtctgggagcagggtgagcaaaaatgtagtcctggagaagcacagttagagttgaacaagtgcttcttcaatcttgtggttctggattggggccacattctggcaaaagagcctttgaatggcagattagggtttagacatcagcttgtgtgcagggggaagccatcaaagctgtcttttgtttgcctgttgatttgtgtgacttgataaaattctctactgagcatttctcatagtacccacttaatttttaaaaacaactccagagcagttaacaactccaagtagcctaaggctgtgtaactgagaagaggtagaagtcagcagatttgattttatatccatgtgagacaaaattgtgtgcttgttcaaacctttcactctgtcttctgttccctccccgatgtttgataatgccagagcccagagtggacagactctaagtggtatctaggggacagaccgtcgaagacccagatgtgttcctgcaaccttgccaataagtataagtccctgacagccccacctccccaagtgtttctagcttgtttattcccaggttaggtgtccccttgttctcctaatttctacctctctgggaagcaaaatgagtgtcaatcacccctaagccttggccccaatgctgcaggcaaatagttctttatctcaacctcttagttcctaggtctgtactttacacaggatcagtgtgtgtaatcttttgttcttttgtcttcacagtaacttaattcctgtggtaagggaggatcatgtgtattcttaagtgtgggtccttattatttgtatgtagtttgcatctgtattctgtcagctcattagtttgtccacttttcattcagttaatgacaaatgtggagtatgcaaatgtttgacattcaaaacagacagctctgcagttctgtgcttttagatcatttactcatttcttcttagagatttatctaaattagcatgacagtggccgtgtttcctcatagttgtacgtgtcctttatggagttatatttggcaccccagaattaggaatgagatcgttaacatcaacaattcattgagataaacaggaccagtgtccttgtgctcttttcatagatgaggaatccacaatacccaagaggtgcactactgtctggtgaggtggtggtgatggctcagaatgctcacttgtgttcattcctttggcattcagctttacactcagggtagaagcagctatgatttctcccataagaacagccaggtctgtgctggtttatcacatgcagttctgtgcttttaggtcatttactcattggccagttcatgtctctggggagacatgcacgcacgcacacacgttatattccagccaaatcgaaccatgcttattttccagaatgttccatacattttcctacctctaagtatctgcagacattgttgttcttgttactagtattacaaaataataataatgataaaaatagctatcaattattgagtgctaatatcttaactcacattttcttatttagtgttactattttcatgtttaagagatgaagaaataaggtttggggcatttggtgagccaggacgtatttctgtctcactctaaagctgctccctctgcctcagcgctgctttcttcctggtcacctggctgaccgcaatttatccttgggactcagggtatctgtctcttgctctctacccctccccacaaatccccaatctatactaaatgctgctcccttgaagtgtctacaccaccctatactgtaatgtagcacattgcacactgcactacattggatagcttatctggctaactcctttactacagaaagggaccaccacatctgtctggtttcctgttgtatctccaggctgagtagtgctagactgtcattgctcaataaaggtgaaataagtggctgaaaatgacttggcaattgtggaaggagaaagctccccagaacccttcagctatatagagattgttgctcttgaagcccctcctctcctagcccatagcaggtgatcagcaaatatttgttgattgactgaatgaatctgatgaagaggagtctgagcaattagtgacagggagctttgggaatctggcagtgcctcagttgcgggttggaggagtaggaggaactaggggcagtgggacgggtatgggtgtgagtgtctgatcccatctctgagttgctaacaggccatcttttatttggtttttgtgagtttctgttttctaagtggaacctaaatgtcagttatgtaggcaaagaacaaaataattctctagctgctatttcttttccagctggctttatacctaccattagagagagatgaaagagacctatggaaggcagatcttacctggttttacatgcacatgtgtacctgtgtgtgtgtgcctgagtgtgtgtatgcacacacactcatgtgtgtctctctggggactggggagaggttctgttttgccaccagcctctctttgaaaggcattgctgtcatcacagtgaaacatgtggcatcaaagcagcagcagcaattatgccaccatttggatgtctgtgctatggcagcatctgttgatgctttgagactcttctgccaggatttcgccgccaaaccatctgaaccatatgttctcatcagcaggaataccagcatcccaagtctttcaggggtgaggcatcatagatcaatgaccgacatctcgatctggataagcacagcttgtgtttggcttagatagcggaggggaggggatgggatgttttgcaattttgatttttgaaacaaaggtattaaaaataatgtggaatttacttatgatccacaataattggcagtgtaattaatggattaattaattacgagtgcagtatttttccaagacctaatctactggctcgttagtgagaagaatcattaagcagaatagcatgaagggcttcactcagaagcagttgtttttgtaagtggcactagagtttctttaacttctggtcagggagggtctcactttctgttgacactaacatggggattttatatgctactgacttgttatgttgtaatatctcaagaattgctcttgattgctttctaattgttacagatgtacgtgttctattatctatccctctttttcctaaagaagagagatgcttgtcaagggtggggactgcatctcctattcctttccactcctagaaacccaccacagcactggacatgtaggaggtgctcagtaattcactcaaggaaagaataacattggcaagtaagacttatttaggaggcactatagtgtggttaagtcactgatagattataaaaattaaaactttttaggtctggcagcggctcacacctgtaatctcagtactttgggaggccaatgcaggcagatcgcttgagcccagcagttagagaccagcctgggcaacatggcaaaaccctgtctctatgaaaagtacaaaaacaattagctgagggtggtggcatgcacctgtaggtggaaggattgctcaagcctgggaattggaggctgcagagagccgagattgtgccactgtgctccagcctatgctggaaagaaagaaagaaaagaaaaaaaattaaaagtgggaatataaactcaccctttccaccaccagttagaaataaccattcttattattttggggcaacaagcaagaggcagttttgctacctaacgtgaaatcacagctctgtcactgctcagctgtgggatttgggcaaattccttgatctattggtatctcagtttcctgagatacaaaaaaagaaaaaaaaaactttatcaaaaaactctgtatcttatttatatatataacaaaaatttaaaggaaaaaaactctcattttaaaattgaatctacagtctttccattttcttggacaatttaaaattaataggaaaaaatttgttattatagatgccatagaatattcgtacttaccagttatacagatgaaggctattggagtctttaaaactggtaaaagtttctagttcttttcctacactgcctaacttttaaaattaaagcacattaaatgtatcctcagaattcagttcccattaaggcagggatgtctgttttgttttctgccacacccattggctaggagagtaactggtatatagtaggtgttgaatatttgctgaatgaatgaatgaacccaaggtcctttccagcccagttgagagtgagtagtataaaataaccattttcctgcttaataacattagctaaaatattttcaggagtactaaagacattttcctccaatttttccagatatattctcttttggtcctttaccaatttctcactttgtcttcctgtaatgctgaacgacttgagtttaaataggtacttgaattgattgacagtattgacattgttcagcacttaagagtctcacctatcatatatagtgggtgctcattaagtatttgtaggaacagtgcagcttgtctgattacctatcaggtctcttctgtacatggccacctttttgctcattagtatttataagccaaggctgtatgcaattatgcccaggtctttcataccagcctcatctcttaccatgcctgtcgagagttcagcactacagcctcatcacagttctctctgttctacaaggatgcccttttttgcatgccttctttttcctccttgctttgcatccctatgacccagattcagtgtcacttttttttttttttgagatagagtctcgctctgtcacccaggccagagtgcagtggcacaatctgagatcactgcaatctccacctcccagtttcaagctattctcctgcctcaccctcctgagtagctgggattacaggaggctgcaaccacacctgacaaatttttgtatttttaatagagacagggtttcaccatgttggccaggctggtctcgaactcctgacctcaggtgatcctcccaccttggcctcccaaagtgctgggattacaggcatcagccaccacgcccggcccagtgtcaccatttttgatgtcttccttgggcatccttggctccttttttctccttctatgttaatatttagccacttgtacagcagtataaattcatttgggtgtcttttcccttaggagaaattagtgttttaccctgtctcctctcccctacagccacttcactctaacatccagtcagtcatgggcacatccagaccctgtcaatgtttacagaagaagataatagcttccttcacctacaagcataggagtaaataggtgttacatctaataaatctgaagggaatggtgcactttcatgagccaggcattttacaactttaatgctcaaaaactttccaagatgaatatgatcatgaatctactttgttctgaggaaacagacacttggagcagctgagtatggtgttaaagtgtaactagtcccaaaccaggatttgtttacttatctaaaccttggtagctctgctttcctggctgcctttttgtctcatatacaggtgttttatctaagccagaggggcagaatttacaagtgcatacacttactctcatacagcctggcaatggaagatcccgtctacatgtatggataaaatcatggagtggtttattgccagtaggaattgggtattgaggtatgtggtatggatcagtggcctctcctggcccattggtggagaacatccagggaccccgtggaagtgcaaggctgagatgagaaatcacagctcagaagtcagccatggtgggtctccccatctcatcataccgttcttagtaacagaataagtcactaagttgtgttttgttggccctttgttatttatttattttttttgagatggactttcattcttgttgctcaagctggagtgtggtggtgcagtcttagctcactgcaacctccaccctcggggttgaagcgattctcctgccttagcctcccaagtagctgggattacaggcacccaccaccacacccagctaatttttgtatttctagtagagacagggtttcaccatgttgcccaggctggtcttgagctcctgacctctgttaatccgtctacatcggcctcccaaaatgctgggactgcaggcatgagccaccacgccttggccctctttgttactttcatgggccacacacctttataaataaatgagatttggtgatagtgcagtttttatcaattaatgatagtacaatcctatcttacaggaatttcatgacacctcacttgtgccaccaatgtgtgctacactagactgtagtggggctaaaactgttaacaaaatcctttttggtttggtctttatatatataaaaaaaattaactgcgatttttggggggagttgggcactaagcagtacatttgcccagatgttaaaagttaatttctaagggatggggagattttgtttatggtatgggaaggaagcttaaagggaattagtttaattgtgtcagaatattaagcaatcttctgccatctgctgtcagcagcgcatgggtcccctaaggttcgcttttccattactctgactttctccccatctagatggagttcccaatatcattaacatgcctcacatagtttcttttgaagctttggctgggttaaatcacttttacttatgcaaagtggattgactaaaaccttttccccaaacacctgccagaccagctatttttgtttccccttgcaatggactcatagcaagtctcacgcatgcatcaccagatcaccagctactccgtttaattgtgctgctctttccactcatcctcagagagaagctcgctttttccagaaactgccttccatcccccgcttgcgaacacgccacctcttctccttcccagaattttttttttttttttgcctgccttctgtcttaaggggattgcccagatagatatcagtgacactctatttgcctgtgttatggaatactattttacaaactttttttgactgtaatctacagtaggaattagagtttacattatgacccataatacacacaaatacacacatacatacatactcatgtacacaaggaccaccataacaaaaactggggggcttcaacagcagaaatgtattgtctgacagttctggaggtaagaagcctaaaatcaaggtgttgagagggccacaccctctctgactgttctaagggagaatccttccttgtctcttgctagcttctggtggttgccagcactccttggctttccttggcttatggatgcattacttcagtcacatggccatcttctccccctgtcttcacattgtcttccctctgtgtgtgtctgtctctgtctaaatgtcaccttttcacacctgtaatccaagcactttgggaggctgaggcgggtggatcacctgaggtcaggagttcaagaccagcctggccaacatggcaaaactccgtctctactaaaagtacaaaaattagccaggcatggtggtgcatgcctgtaatcccagctacttgggaggctgaggcaggagaattgcttgaacctggtaggcggaggttgcagtgagctgggatgatgccattgtactccagcctgggaaaaagagtgtaactccgtcccaaaaaaaaaaaaaaaaaaaaaaagtcatctttttataaggacacaagtcatattgaattggagcccaccctattaattttatttttaacttgattgcctctactacagaccttatttccacataaggtcacattctgacatatacttgggtgggggatacctacccagctagggctccaacctattgtgtttagggagacacaattcaaccgataataaataactcaccttaaataatgccttcatgttctgttctgttctagtttattctattccattccattattttgtttagacatgtttgttgcttttcactaacttgatttcacattgatttgaaaatactgtttgggacagtgttctgagtctgaatcctggcttctctgattttcagtttcttcacataataaacacaatcttacttcagaggattgtagtgagaatgaaggagaaataagagaaagtacttggtaaggtaaatacagtaaagacaagtaaaaatgagcaggaaatcaggagcattaatctgttcaatgaaactatatagaatcctttatatctgatatgatcaggaccttgagttgtttgttaaccaaataattcagtgaaagtgtgggattattagcaattacatacacatatatacacatattaagatgtaaatagtttatgagttctccagccttttaatgtaagactaagagttttgtggttttgttaagagtcctgtgattgatatcagacatcatgtttcttgcataaagcccatatcatctactgaccatttcctctggagtttctttataatggagtgaaaatttcaaaacacaaaataacctgaggatagaattcggactagagattcctttaccagtagaggaaatagttaatgatattcctgtaaaattttaagattcttttgtccacatctaatttgatgggtgatttttaaaaaattgattctcatttaattttctttctgtgcacactcatatgaaatatttaattaaattataaaatgttgttaacaaaactggcaaactagtaaaactagtttggggaacaaactcagttgattcttgacacgcccacaacttggttggtgggagcagaagaggaaatatcctacagaaatgcctattttccatgaccctttattccagctatgggcatgggttcgtattttacagaggaaatggagagcaatggttgatttggtgagccccttaagtggcagtggattaagggagcttttaccttttaacaaccacttacgcaaatcagttgtcagccacagacagcctagatgttttaggagacccttgtgtaaaccttctgtagcactaatatccgtgtattcaccagggatccagggtatgtgatcaaaaggcagatctggccaacaggaggtgcaatacagacagagttgagttgttcactaagtgtttttcttcctgcctgctatacttcaagagtctgttggtgtgggcttgggatgtatatattcttattgaggcacagactattggctttccttggctcttgcccaacacctctgagattgtcaggaagggaaaatacacttcgcagtggagtagctttctctattaacgtgggtgactttttgcctgtgttagtatttttatctagcaaaatgagttgaagctgaacttttaaaaagacatatgcataatttcatcaggtatttattattaaatgtcaagtgatgatatattaacttagtgaggtaatgccaaagaaatccacagaaggcctgaagtctggctgtaaatagctgagagccattttctttgtaactgtcttaggtttggatcacttatccacaaaatgtataggcttttgactttgattgtgtccttctaagtgttttctctgcagatcacagtcctcaaaaaatagacctaatattcagaagataaggttaatgagaaatggcgagtattgtaaatggaccaaattatgaaagaaaccaaaataaagacaaagatttctgaagttaaaagtactgtagtttggcaataaaaggtcatatcattgcatatttgtgcattacttacttcctgtcagatgcgcattttcttataaacagcgctatgaaggaggtactttctataaagttttttctccaaagaaacagacacttggacatttaaatactagataagtaacaacagggtaagccacctaaatagaagggagataaatatcaaaattaaatataatacataataaagttatgaagtaagttgatatgaacagcaaatgagaggaagcacagatcaataatattcaaaagagtatataatttcataattaaaagatttatataagtatgtacagatactcactaagagaataccataaaaacaatctgctggtaatttacaaaacctaaatgaaatggaaaaatcctggaacaaatatagattattaaacttgacctaagaacaaatagaaaatctgaaaagattaaaaccataaagaaggagacaccttgtttcaaccgtgacatatatagagtttggaagtccttattgccattcttacaacaagagaaaaatgaactaactagaaatttacttttcttgagatttggttacctggagcagaaaccaccagatgccataagctggcggggatactttactagttattttgatgaattgctggaaactgagtgcaggctagtgggagattaataagctcctgggagttgctgtctaaggggatcttcacactttcacaggcttttccccctggaactctaccaggtgctcagtaagaggaccctcatggctctgggataggggcttgaaggggagtagccttcgtgaaacccttcctgactcttctctctaacaaagacctcatctctaggaggaaagacttccccacagggcaattctgaaaacttatcccagctgggagacgagaatttggtccaaagaaataaaaaccatagtcaacaggggagcttcaaggtaataaccaggaaagggactagagctgaaggttgggcagaaataaagctctacctgtgaagagggacagaaacacatctgaaattcacacccttgaaacacagcctcactgaaagactgaggcttaattaagaagacttgcaacaccatcctcccctacactccaccacaatgacaaggctccagtaataataataggggagcccagctgaaaagctgcaaggaacagactctctgtgagaatcagtacaaaggtaagccccaaagctaggaggagaggaacaaagaagcctgctataggaatttgaagactttggcaccagtagctacaataaacattaaacacagctcatctcagattaatagaaattctcacaccaatggcctatttacttcagtgcctattatcctatagaacatgtctggctttcaacaaaaatttacaaggcatgccaaaaggcaaagaaacaaaaaacatccaaagacataaagcaagcttcagaaccatactcagatatgacacagattttgcaattatcaagtaatttaaaataattatgtttaatttgttaaaggttctaatggaaaaagtatacaacatgcaagcctatataggtaatgtaagctgagatattaaaactaaaaaagaataaaagtaaatgaaattaaaaattaaaacccacaataatggaaataaagaatgttttcaacaagttcataggtagataacacaaccacgggaaaaaatattgatgaacttgaagataagttaataaaccttccaaaactgaaatgtaaaccaagaaaggatggggaaaaaagagacagaaaattcaagagctgtgggaaagcataaatgacggataatgttttcagggtgagtctttgtttattttctgtcctaggggagaaaataattagagtaatattactcaagaattctcggtctgggtgcagtggctcacacctgtgatcccaacactttgggaggctgaggcaggcagatcttttgatctcaggagttccagaccagcctaggaaacatggtgaaaccctgtctccacaaaaaaatacaaaaaaattagctggacatgatgatgcgtgcctgtagtcccagctacttgagaggctgaggtgggaggatcacttgacctgggaggttgagatggcagatagctgagatcacaccacagcgctccagcataggtgacagagtgagaccccctctcaaaaaaaaaaagaaagaaagaaaagaaaaagaactttccaacattaataatagacacaaaaccataagtccaagaagctcagggaacaccaagcagaataagtatcaaaaaccaaaaaaaaaaaaggccagcaccaaaaaccccatagctagacatgtcatatttaaaactgcagaaaaccaaaggcaaagagaaaaaaccttaaaggaaggtgggggcaagggacataaagaagtggaattagaaatcaaaacttgtccactctccctttccacctccacccaaccatgcctccttcactaacaagatagcaggcccatcagtcttacagacaagtttacttgcaaacttggtagtaccatggcctcagcttacatacgcagagcttgagctcctctccaccattctgtctccaaagaaagaaaaatgaagatggatatggggggacaagtagatgtaatgtcaacaagaagaaaaagtctgtggtacctgagcaagatgtctgtttacattgattttgtatttgaggttttctttcttctttttactttacccactcttctaagttcccacactcaatgtcttcttaaattgtttaattcaaggatttttcacttacttgctgtgtttccctgagccagtcttatttgcttatttttccctaaaaaggaatgttctttgtaacattgagaaggctcccagaaacagtgagttaaataaaattcattgcagtatgtgattaagtgccaggtggatattgcaaaatgtaaatgtgataggagtttagagatgagagctggaggtacaatataggaagatataaaagagttagatttgaggtaggccttaaaatttgtggttgctatttacagaggtggagcttatttccaggggtgttctaggccaggacaactgcactactaaaggcccagggcgggggaatgtgtaggacaatgcactggctcatttgctccatcagcagagaaaagtttatattatggagtgttacaaaacaagtatgggggccgggtgcagtggttcgcacctgtaatccaaacactttgggaggacaaggtgggaggatcacgaggtcaggagatggagaccatcctggctaacatggtgaaaccccgtctctatgaaaaatacaaaatattagctggacatggtggtgggtgcctgtggtcccagctacttgggatgctgaggaaggataattgcttgaacctgggaggcggaggttgcatgagccaagattgtgccactgcactccagcctgggccacagaacaagagtccgtcaagaaaaaaaagggagagaaagagaaagaaaggagggagggagggaaaagttgtatatcctaccctgaagagaaaaacaactacaggttttggaactttcatccataaactcattcattagttcctccattcaacaaatatcaaggatctgtatatgtcagtccctacactaccacagagagtacaaatattaaaaaagacattattcctgcttccaaggagctttacttctagaaagacagatgtgttgatggctaaaacacactgtgacaagtgctgtactagtggaatgtatgctgggtacaggatagccagaagaaggagtgattaattctgtcaggtaggaagaagaaaataaaaagaactgggagaatggaatcccaagtaaactaccctggataacctagtagctaatccacctttgtcaaattctcaacattatttctcagtgagtgttcatttgacctttgaggtcttctgcttgtctttggtcacagcctaactccattgtttgaagaccatgtcaccatggtacaatatggcaggtggatgaaactgacctactggcaatttccccaggtacctcttacttcccatgatggctaattttatgtgtccacttgcttgggccaaaggatgcccagatagctggtaaaacatttctacatttgtttgtgaggatgcttctgaatagcatttgattcagtagactcagtaaagaatgccctcaccattgtgggtgagtatcactcaacccaatccattgagagctcatgtagaacaaaaaggcagaagaagggccattcactctctttgcctgagctgggacatctatcttctcctacccttaaacacagatgctcccggttcttgggccttcagactcagatggtaacttataccattggcttccctcgtttgcagacctttgggtttggtatggaattataccaccgactttcctgggcctccagcttgcagacagaacatcatgagacttctcagcccccataatcatgcaagccaactcctcataataaatctctttctgtatgaacccagttggttcatttttttctgaataacactgattaatataccaccctatcctgtgttcttcctcatgaccattttctcccaagcagatctctcctgtttgacagatgtttcactttggggcatggaggttgcttcactctgatcatggaggatacttttccagtgccttctcatggtgctctagaggatcacaggcatcatggagggtgcacctgggagcatccttacaacagcatctgctgcaatatgaaattcattgtggcacaacctttctcaagcccttctccaaagaggtttattattcagcaagaacttgctgtaatatgatctcatttaataatctttccagtggcttctaaggatggcattcaaacaaggctccagtttatacattaagattcatgcctgtaatcccagcacgtggggaggccaaggcggtaggatcacttgagcccaagagtttgagaccagcctgggcaacataacaagaccccatctctacaaaataaattagctggacatgatggcatgtgcttgtggtcccagctactcaggaggctgaagtgggagggtcacttgggactaggagcttgaagctgcagtgagctgtgattacaccactgcactctagcctgggtgacagaagcaagaccccgtctcacaagaacaacaacaataaaagattcattcaacatttggaggacttttagaaaaatatgtatttggaaaggaggcaataagaagttagggaatgagaatggctagaaattttgtgtccttaggcaatttgtagaaatttaaaattttcagtgagcagtgaaattctgctttctttagcaaaattgttttgttttgagctttcccccaacttcctagttaaaactgtgaacattttgaaactgtgaatatttcaagacatattcttgaaatttgaaatgtgtcttgttattgtaaaagctgagaaaaatcttcattccttggttcataagtacgtgtgcttgattgatacagtgttccttatatatccttcctagtttccactatgagttcagtttttgttttgattgatacagtgttccttatatatccttcctagtttccactatgagttcagtttttgttttttaatctggcagcagcagaatttttaaaaagagactcttttaccatttgagccatactttctatcacattgtcttaacattcctatggagattgtcttgctctctgggaaataagctattttaggggttattagagaactagatatactttatttctgattccttgtgttaccccaggctctgataaaactgtattttagtagcagtttatacacttcctctctgattgtatttttagcacataaagagtccttaaaaattcctttataagtaagtgttcctttcttaaataaatgccttagtgcctcctaaactggagtaaccaagggaaccaaggtgttctcctctccctgaactaatctgatatctttgcttcgtcacctggattaatttgctgccacgaaagctgtgcagatggtggtagacttccagaattgtttcagaaggatgaggtgactcagattcttccagtgaggtgctctgtgtgcacttggcctggaggaacatttagatttcaactcctttccaggaaccagtaacagcaaatcatactagttacccaatgtccagattgcaggtatctctgaaacccaggtgactgaaatctcccaaggtggatcagataaaggcatcctagcaggcaaacactagacagatccaggtttctaccctcttcctggccagatgaggaatccactctacagagcatgaaggggactctgtttttatcatgatactgtcaagtcagtgccttttaaggttttcttcttaatatcttagaagggttgacccataaagaccacaacagaaaggggctatgagaggctaaacttgttttaaggtgaaactcaattgttctagctgccagataccaaccttgtactatctctgcttaggcttaaagccaggtgattttattagataggaaaattctttaaggaggtactacaagagggtagtgggggcaaactatgttaacaagagaaagccagggagatggagattgactttgaacagttacgggatattttcgagagaatgagttttttttattccccattgtgatggaggctccggtatgctaaagactggagctgcagtagtgagggggaaggcaagcacagttcttgaagagattcttagaattatgccttttcacttcatacatctcttaaacaccgacaacactgactacaacatagtaagtgttctataaatatttgttgaggggtaacatgaataaatattaagaatgaattttctaagcttttcagcacttgtacctttgcttcagttcatgcatttactgtagtttgcctgtgtaactttgggttgatttgagaggaaatgcccttgattacataaatgtaactagtcaagaccgatcagactgaaatctaatgtaggcacctaatttaatgaggagagaaaaaattacccaaacaagagcatgtgtaattatgctaaatttcatgactttggggtcataaatggatttttcttgatgttcatctgacacgtattaattccagttgttgctgactattaagcagcggcttgtagggtcctttataataagaggacattaattcctgttaaattatgatgagcctcctgcagcatcatacatttcattcatatggatgtcactaataaggagacaataaaagacgaggaggatcaaaaggaagcttttgctgcagaaattgatggggaatgaaacttcccagcccatgaggcaaagtggtggcaaagagctttaaaatgggtgtgtcagtcagctgggctgctgtaacagaataccacagaatgggtggcttaaacaacaaacctttattttctcatcattctagaggctggagagttcaagataaagattccagcagtgttcagtttctggtgagggctctccttctggctgctagatggctgctttgtcctcatgtggcctttccactgatcacatgcgaagaccagcatgagagatctgaggtgtctcttttcctaaggacactaatcctatcagaccaagaccccactcttatgacctcatgtaaccttaactacctcctcataattccaaatgtagccacaaagtggggttagggcttcaacatatgagtttggcaggggtgtagggagggtatcatttggtccatagcagggggatagcttcgtgtttgaactccagttctttctcaactcagcttcttgactctggcctgttgcttaggctctccgagccttagttcccccacctgaagcatgggagcagtaatcacagcctgggttggaagatgacactgaattaaataagtgtatgaaacacctcacttaaggcagggcacagagtgaacactcaccaaatgccagccctcactgggattttgtccttctttgcctgttcaggctgggttccaggtttgcaaggacatttctgatgttgggactcctcttagtgataagtggatcatattctgggagagcagaaaaatcttcagaagcatggatcaaatatggaacatgtgcctatgtgaataagtggtgatgttgagaaaatgagaggattagaaagcatatgaactcctatggaaattacggcatagcgatgcaaaggaaggcatttttaatgatttgagtaaatgagagagtgaccttgattctgttctttcaaattataggattaggtgaagggcttgctttgatgagaaaataaaatggaataattttcggcaaaagttcgttttaaaattatgtccatatttaaatatttttctttaataatcctgtcaactattaatgaattaaacattacgtatagaagtgttgtttttatttcttctgctgcaaataagtctcatgaggaaagactatacatcttctctgggctttcttctcgtgatatttaaaattaagttcctctagccaagtgttatatataattcttattcatgattttagcacagatgttaataaatgtcaccacagtatatttgctttctttgttaacctgaatcaatgaagctttcgtgtgtgtgtgtgtgtcgtgtgtgtgtgtgtgtatgtgtgtatataaacacacgagtagagcctgaacagcaacacttttaaagagataagcatatttttctccctttgtacttgagaaaaaagatgtcatcctgtgtcgttccagctgcatttcaatacatttgtaaattttcgttaaatacgctgcttgtgccctgtgtattaagccttctaatgagctaatatcagccctccactacagtttatctgtggaatttcctcagctcagcaaatgcataatctttcattcattcatcctgtagagcacttgtcagttggtgctatttaatgtgacaggaggaggaaaaaaagctgtgttttaaagtgctgtcaaattattatcatttttttggtcccagtccttgtatttggtattcaaaagaaaccctttattttagggcattgagcacaaaattagatcagttccataagataatgaccatatttcacagttagaagccagcatgattgcagggtagtgcttacaacttagagttgtttcttgttgttcctagaagtgaacttgtagatttatttttcttttgtgttttgccagcctcagacagcattctatacaagtggttgggaaaacagaactttaatttttctgaattcagtgtagtggagtggacataatctttttgactactaaagtgtcctgatgtgttgggtttttttgactcatttgtaagaagaagtaaataagaagtatacattgttcaatcctgggaaaagaaaaaaatgcatgagatgaacaagggtcaaaaatgtaaggaattttaaaaagagtttactttttacatttcttttacctgagggtgtttttaggattatgactatacctgctatgtgtgtggtggttggtgatttttttttaaatcatcagatgtgctgcagctgtggaattctacaaatccagaagtcctttgtgctattttctgcactgcctttctcacctgcatgctatgtagccacttaaaagttcacttgaatttttttataggtgtgtgtgtgtgtatgtgtctgtgtgtatgtgtgtgcacgcgagtgagagagacggagagagagagagagaccataaaaataaaattcaagtacagtggggagcggggagagagagtaattactctgggaccattttggtttgtggaagggtggagctttaaccttgcttctgagacatctgagagattatgatgcgatgccctactgctggacatataatctgacaatgtctttgttgagtcaacttgaagcccaagagacattccccagtttttccattagggggtccttatttttgctgctgtacattgttgtgtcctttttttttgctttttgtttttagctaacaagtaagcttagtagctaatgagaagagggagtgagtttacggaataattttccagatcagtttctggcccagacttcaactgcaaccagcatgatttcagagatgccaggtccttatttgctcattgacctccctggcctccctgccagaaccaggcaaaataaacaataaataaaaaatatggctcctttcctgccattttcttggaatataatcttggggacataagccaaagctctaataaggaaaaataaaccttatggggtggaaatttttatatatcatactcaattttatttttattttgaacattaggtactgttggtttatgggacaacttcaaatgcatacatcaaaggtcttaaaggtgtggagtctcttaggcaaggaaacagggtaaaatgtatataatatatatataaatatatataaatatatgagaactatatagattatatatattatatataaaaatatatatatttatatattatatattatatatataaattatatatatataatatatatataaatatatgagagatgataaaatcagtgaaggcctctaggcaagttagactgaccttacttttctaggaaaaaagttaaaggtaatgttttttgagccctgccatgttagtgtcacctgctaggcattgtaggaatttcaaagtctcattagaccaaaatctagtagggaattatgtaaaatactatggtgtaagagcagtgtcgagtgcccagagaagtacagatgcattttcatgagaggtaagtgtggggagagattgtgtctagttcattgcttctgaaagtgtgtctacatacccaccacttgtaagaaatacaatttcacagggctcacctgaaccttttctcagggcaagacccaggaatctgtattttgacaagccttctggtgacactgaaaaacactggctgtgtttcgcatggaaggagagaatccagggattctcagaggaggtggtgattaagttgggtgggaggggccgacagaataggagtaggccctgcaggaaagcaaagttcgcaaagtcattaagttgccacctattttagtgcctccaactcttacaatgaaagatttattttttctgaatctaaattcatcgtgtcttctcaaaagcctgtttcctctgtttgcattctcggtggaattgtgaatcatggtgatcatattttgtataatagcctttgccatatttcaaggaggatattaagttccccacagtcttttcttccccatgctaattaatcttcattcatcagccttttctcttacattccaaccctttcatcattttcattgctcttgtctgggctttccctaaatttttcagatttccccaaagatataaagaaccaaactaaacctggtgctgtgttgatatctttacctctgcaggagtagatgggcatcttatcccccacatgttattattattatttattattttttgagatggagtctcgctctgtcgccaggctggagcgtagtggtgtgatctaggctcactgcaatctttgccttctgggttcaagcagttctcctgcctcatcctcctgagtagctgggattacaggtgcgtgccaccacacccagctaatttttgtatttttagtagagacagtgtttcaccatgttggccaggatggtctcaatctcctgacctcgtgatccacccacctcagcctcccaaagtgctgggattacaggcatgagccaccagacccggcctatttttttttttttttttttgagagtttacctagtgaagtcgcagaatgtatagtaggatttgtaacctgttacccttcaactcatggaagattggagattgttcacattcacatgggattcttagatctatataggtaccaaccattgtctggagactccataactattatgattcccacatagatacatttttttctaacatatttagctgtaataagaattagcaaaattcaaaatctgtaattttatcttcttatgttttctcaacaaagagtaaaagtccaactatgatggtggtgatatatatatatatatatatatatatatatatatatatatataaatatacatacatatatatatatttaatgtaagactttatatttttagagaagttctgtgttcacagcaaaacagagaggtaagcagagatttcccatatacccccctacacacacatgcacagccttccctatagtcgatatccccaccaccagagtggtatggttattagaactgacaaacctacattgacacatcatagtcatccaactcctacagtttccattagggctcacccttggtattggacattctgtgggtttggacaaatgtatagtgacatttatccaccattatagtattcagactattttcactgagctaaaaatcctgtatttggcctgttcttccttctacaccccaacccctgtcaatcactgatcttcttacagtttccataattttgcctttttcatatgtcatatggatgaaatcatattctatacaatttttaatgtcaacaaaggaacccttctgtgtttgaaaacatgtttgttgaagcatcaggccagacaagtggggcccatgatcatctataaaatagggagaatagcattcctctttcctgaaatttactgtgctgataaggtgttatatataaaagaacgtagtaggtgtttagcaaatggtggttattatttacatgttgagtattctgtctcatatgtaccttttaatcatcatgatcatttgttcaaagagccctagtttatttagataacacctgtcaaatggggtcacatttttctccaactacacctctgtgttcttatcattttcttgtttttctgtttctgtgggaaggggataaaggaaaggttcagttttgagagcttcctctgtctgaattggctttccctatgctggatcttgccataagaggccccttcatactcaactgaatgtctagaatttcagctttccctgcttgaacgacaagccataaaaaaggaaatagtatcggggtgggtttgctgaacagcacaaagttgaaaatttaagacacttttctatataatcatttgagctttcaccaagaatattatttccatatatgttgacaggcgggagaggaaagtttcttagcagaactgagatgaaggcatggctggtctcagtgagtcctctcacgaaacagacacagttttattggtccaattctgcccctaattctgggatctgtgcatgcatgttggtgatgctggcacaggttatccttccaggagttgctatagaaacaggtaacagccacacccactttctctgtctgttttgcattttgcgtgtggaggtctggcggtgctgccttatgcgcccttctttggtgggttgctgcttggttaatgatgctcagtccttaggattttctcttgtttggcatactgagatataatttcctatccttgtcacttttggcttcactccttaggctttgctttgagttatcttgctaacaaaattcacatgtctaaaaacaagctgagagagatcacggacacctgccccttatccccacccaattcatgattgaggaactagaacctttcatgaaaccacaactgctccagaaactagagaacaattgacagtttgatgcttaaaaagagaactagaaaaataccccacggatttggtgatctggtcaatacagagtactttaagtcaattagaaagttatacttcctaggtcattcttcttttgccaagctcagtcattggtggctttccattgcaaaataaaatgtagttacttttgtaaaattttaaatgtagtctgtcatttcttattttacttttttaaagcattgcattagttttgtatttctccactacctctgcctaggagaaatacaacacatgggcttggatgattttctttcttggaaacatggttgacaaagctatacaataaaaggataattttctcagcagaacaaaacacactaccctcttgtcgctgggcttttaaaaatctgaagaataggccgggcgtggtggctcatgcctgtaatcccagcactttgggaggctgaggcgggcggatcacgaggtcgggagatcgggatcatcctggctaacacggtgaaaccctgtctctactaaaaatacgaaaagttagccgggcttggtggcaggcgcctgtagtcccagctactccggaggctgaggcaggagaatggcatgaacccgggaggcggagcttgcagtgagctgagatcctgccactgcactccaggctgggcaagagtgcaagatttcgtcaaaaaaaaaaaaaaaattctgaagaatacacttacttagatacatttggcttgtattttaatatttctgcagtgacatcgctgcttcaggaccttctgaattgaaaaataccaaactttcttgccctgatgtgctgggaaaagaaaaatagattttcctgccaatttcagtgtggatagccatggtgcttgtttaacttgttctctttataagttacaaacctagaataatcctgccatttcagaaattaaaatgtgttctcgtttgatctagtttattcagcagtgagtgctgaggacattccacagattgatcagcctcttcatttgttatatgccttgggtattacattcctagatgtttgtgtgttcttggcatgtctgaataaggatgggcatggagtcaggatccttggagtgggaacagatgcttcaggccattagctaatctgtcctcctgcatcactggagcagcaggattgcatttgattcacctcatgttggccatcgtttcggaaatgtggggccttattagactgtactctacctctatgcttcagatgccagtggctgtggtttaagaagacactagattgctgtggttggaaaaataacatttgtagtgttggaaaggacagtaggcataaatccatttgccagcagatggttcaaagcatctgacacctaggactaattttgcagggtttccctgttactagctttgcaacgtgcaaatggggacctgaaatgtactttattatagctcctaccaccccaaagttgataaatgtgtgaataattgtattagaaaaagtaccaatcttttagcataagcatttttgcttttttttttttttttttttttttaagagattaggtgtctgtgtagcctaggctgacctcaaacttctggacttaatggatgttgacttcatccttagcctcccaggtagctggacctacaagcaagtgccaccatgcctggctatcttttgttttgttttaaaccctgttccacgtgattcagagccaaccatctccacacaggcagtctcctggaagcctaaaaaaaaaaaaaaaaaaaaaaagtccggcatggtggctggtgcctgtaatcccagcactttggaaggctgaggtgggcagatcacgaggtcaggagttcaagaccagcctggccaacatggtgaaaccccatctctactaaagatacaaaaaaaaaaaaaaaatagccaggtgtggtggcacgcacctgtaaccccagctactcgggaggctgaggcaggagaatcacctgaatccaggaagcggaggttgcagtgaggcgagatcgctccattgcactccagcctgggcgacagggtgagactccatctcaaaaaaaaaaaaaagaaagaaagaaaaaaaaccttccacgttaacatcaatcaatgataattaatttatatgacactcaagttagtgtattttatacattgttctctaattgggaaaatggatagtgtattttacacatttttctctaattgggaaaatggatatgatgttttcttaagcgcatctaagaaaccacttgaagagccacttggttcagattatttccaaactctgtcagtgctttatcgactaaacagctctgacttacttgggatgtgaaaacagttcaaatagaaagccagtccttggaaagcagttaacatctaagtaatgagattttagtggggcgtgaggtcacctgtgagatgcccttgtgtagcaggttccagttaagagggtgaacgcagacagaaattggtgggactctttggatggctcctctagcatcctttacagatgcagatctgtccacatcctgctgggaaagattgatgcatttgacctttggttggagcagatgatgatgagcaccaggacagatgtgggaagttaggcagtatcctagggcatttcgccagggcagcttggatgtgtgctttggaaaataccagtcagacaggacaaaatcagggccagagtagaagaataaaggataatgaaggtattgaggcaactgtttgattctataagctctccttttgggtttagaggtgaatttctacacgtcactgtttttgcataacctgctgttttgatagttcttaagaatccatggtgattttgttgtggttcatttcctattttaaaaatgctaacctattatgcaagttttttctaaatcacagctgtggggaagagttcactgtcaactggtaacagggttgtgtttcttattagataactaaactcattacagggaatctattttaaattgtacacactctcaaattcaatataatatgtattggatgcctcttaggtgcattgctgagttatggggataacaaaatgagaagatatggtctctgtcctcttgaaacatattatgtagtcagaaggcaggtgtataaaccaataaatacaaagtagtgtaatcagtgattgtagccacagaaatatgcttaaggtaaataataagcctgggagaggtcattgttttcattcctagagaaggagtgtatgaatcagggaaatcttcagaggggaagtgatatctgaagccatttgacaggtggatcagaactcaatagaaagggaaaaaatacacaatggaaaatatactgggcagagccatagcatgggcaaagtttcataggtgggaatttttttagtcttaaaccactcttgatgagagaaaattgactaaccaaacatttaaaagtaaaacaaaacaacaaaacacattaagtaatagaccctgactttcctgattattaacacagaaccattgcagctcactgtggatctccaagtgatggttgtccttaagctcaggtgagaactattctccttaaacttaggagaggacaatagcagtagatatagaaggtgctttacccctaaaccagcaggtgcttaatgaattcctgttgagttaatgggggtggaggggtagcagggatgattttcaggtgggaattctagtctcctcactgattgggaatgtgaacttaagcaagtcacttgttgaagtcccacttgcctcttgatcaaaatgagtttttgtatgtagattatctaaattctcttccaactctattccatcaacaatcaaaacatcttttaattgatttccgcaaatgaaggagaataattcatgtgtctggaaaatttccttatactggataaccgaggtatttcatgtcacttagcaaatctcttagtaaatccatcatttagtgaatgcattttaggtaatggtccccttagaccttaaagaagccaacttttggtaggctagaaaaaaatactttaaaaaattattatttaggaataattacaacaacagcaacaaacttcagtgcaaaagttaaacaccccccccacccccccacacacacacagagaaaacaaagatttcatcataacaatttttggcatcgattagactctgtgccttgctgttgtcctggttgttatcctccaaatgtgaccctgctgcatgccaagtcatcagaaggctatgagcacctttggtaaggatgctacttacagtgagtctgcctcactgtacttgcctccccaggacccatctgaactgcatattggccctaccactctggggaccatgccaagagggtgcatacctgtgcgtgctcatttctgtctgcagtagtgacagatgcataaagtagtttgcttagggaatttgcttggattcttttctgaatcaaagctgtttccaaaagttggtttttatgggcatatcttgctgggaattgccttggtgctgttggtaaataacaaagagagagccctgtccttacaatgcttgcagtctttccaaaacaaaattgtgcctatgatagcttttaggaaatcactgggcctggagagaaaacatttttatagtatctggacctccaagccaaacaacaatctgtcttttaaatattacagatgaagcaaaagagttttcaaaaggaacttcagtgtttccctaaccccctctccaccagacccctgacttacattccctgagtgaaagctcttgggcacaggctccttgttctcctacccccaattcatatgccattctcatttattagtgctcctttggaaaccagagctactatgtgacctctggattttattttccttatgtaagtgatcaaattataaaacagctttcttaaaagctgaatgtttgtgttgctattaacttttaatgtttcatgatgtgctatgctcctattttcatctttgtgtagcattcttaaatgtggtttaaaggacttccacatttctaaatagaaatggcttctggggaaccttgtaataggttgcaggtgagagggatctaattaacttgcatagatccagactattcatggggctccagtttttgttaattctggtataggatgcctagaacagagagttaggggcttgaaaaaactgaagattcccatgaagactaattggaagatacagagaagagataggggagtatctttatatttcttttatacctcagctttctttaatccttaggtgtgttgtaatagcgcttatcttcatgattggattggtattttgaatgtccactttctgcttttcccatactttatattgtttactggtgttactgatttatatttcttaacctccagctgtgtacctgtcactaaagccagggaccctgactagtcttaaaggagataaatgagaatcaggatctagtgagtcgatttcagatggactccttttatctgcaagacttcctgccatttctcaggctaaatgacaaaatcatagcctgttggctcataggatacttgccatcttgagaggataaccttttaacctcttagtgtcttcgggaagataggaaatttggtttatataagaaatcatttccttaaggataaccaagacaggaggaacacagagagtccgtttagattttatgcccattcttatttctgtaggtgattatcagagcaagggtcaacaaagtaaagcctgccggctggctgcctgattttgtaaataaagttttaacggaacacaggttttgtcattcaagggcagagtctagtagttggcacagagaccatctgacacacaaagcccaaaatattcacaatttgactctttacagaaaaactttgctgacttctgccttagaattttactggtgtttaatatttattaggaccacttatggatgataattataaatcataaatggaaaaggtctttttgataagtccatacatcatggtttctgctttcccaaaagtggccacacttttatagattgctccatgaggatgcagtggtagaaaaggctgaaccaagtttgcatgtggatagctatgctcagtcttagttcagggggacattctataacccctcttcttgtctcccactcaacttagtatcgagtgggatttcacatcaaagttcttgtcctgaaggattcagcagttccagaagacatggcaagaatcagctctcagtcagcttttcaactccttgatgggggggttaagagtagagagaactatccatcataactaaatctttactaataatttaaattctacagattccaggactatggcatcttgactcagtaaatctttcttgcctttcctttttttaaaacaagggaaaaatatacaaacagattaaagtgcacttacaaacccagctggcttgttttaagctcccaaaggaacacttgattcccaattatactatttttcctttttatcaaattgctaagaaacagtaactcaattgattttaatgatttctatcacacatagcctttaagactagtaataggtttattatgctcagtcataatgatgatattttacttctatgaatggtatttttagcagggctcataaaatacccagtttgattttgtttattaactttctcattttccattagcggatgttttcctgtctcagataattctcctgcctgttgatattacactattcaatagaaatgtgtgtttcaaaagaacagaccacatactctttcaggtttggattggatgcttttatttaaatacttcccaaagaataattcttcagttttttgtcaaataccacttttaatgttgtaacttgactatcacttgaatgtcacttcgaatttaactcttaattttggtggcttgctatttagtagtttcatattgctgagagcctaaacattaataggtaatttttttctattttttgataagaaaatattcagtttccatttattcagtttttatggtctgcaaaattagagaagatgtctggttctgtattaggaggttttaatttgttgtttaaatatctattgagcctctttcagtctgtttgtgcagtgatctaagcttgcataaggcatctgaattattttttcagcttccccctgttttattggcaagtgaccgtgtgtatggtaattgagcaattgtgtgcttacatggatttatgaaatttgcatgagcaacttttagagatcttacatttttgtctctaagcagacttgaagaggaagctttctgaaatattgtcttttgcttaaaattatatttttgctttttattgagagacaatcgacctcaaaacattgaagatttgtttccctttcctcttggctatatcttctgtttttgttctcttgaggactgagtcaactctccgtctctaagtggggtaggtgaaatgctaaggcaagggataggtcatgggctcagccccaggtagaggaacaggcagcgagctgagccctcatagctcctcctgatgctcagctgctattttttcctccctgtttgacaaatgaagacactgacatttagacagtgagagatcctttgtctgaatcagccaacaagtgtgatggaacaaagttgcgaacgcaggtctgactggcattacaggctgtgagctgtacctggtgcccctttgtctgtaagtgagcaaacctttaagtaatgtattactgggctctctggtcaactttttttgactgtgccatcagggagacgcacatgtctcagggagtttcctttgcctatactccacaagtctttggagtacatctagttctccttccaatgaccagtgagaaagacaagtttgctttctttatttcacaacctctttccacaacaatttttctccttgttcaagttccaactcacttattcctgaaatgggctctactagcccctggatgttttgcctgccacttcaaattctatttctgcccctgtttcttgctcatacttcgctgagcctccttcactttttcagtgcctggagcaacttttgatggaaaagtgcttgtgttgaacttgggcccctctaggttgagccaaactccatcttgaagctatagttccttttcagtaactgacagcatctgtgaaggccctatgaagggaatggggttaaagggcctttgaagaggagaactgtggcagggcacataggatggaggagacaggagagagttctttcaaaggaggtgagtgcttgaccagaggctgagggcaggaagcaagggtgtataagtgtctataaatgttgtgttgggtgtagaagggggtgtagtaagaggaacaaaaggctgaaaagaaggctgaaggtgggatgtagagcctggaatgtgaacatggctttggactttcttctttttttcagcaaagagctgctgggacttggtggcagggaagactttgccttgtattgtggctggcacagtctatcagtagatattcgttgcatggctagtggtcaaatcagttgtcttgcaagggacgttgaccagactagaggtaaatgactggaggcagcatcactgaataggatattagtgttattcattcttcccccttctctatgtctgtcactcaaaggaaacttgagattcactaaaggacaatggctctggaatcatatttctatttgatgtgtttacactaaaagcatttcatttatatttaggagaaataatagcaaagactgtatggagtataggcagaggaaaatctctgagacatgcctatctctcttcctctcttcctgtctttagtgtgtcctgagacaataatcagcaaaatacactggacagccatggattcctccaagtcagtactttgcaagctgagttatgaccctatacacggatcatgccatgaagttagtcggttgcaaagagcattggaaatgacacataataaaatataaaacagctcattgcattgccatcataaaggtcagttttgtgacataaaatatatttcttattgtgagtcatgaagaagtttgaaaaacaagggtgaaaggaaaaggatctcattactttggaatactataaatctatctttagctctgcgtgtaaggagatcatgtaatttatcatccacgatgtgtttctgagggaaagggctacctcttaataattatatcacaacaactggtgtaaccacactgcctcacgctaattaggaaatatggtcactttgcctgttttagtcagggttctccagagaatatgaatatattctcagcatccgtatctacctatatctgaatctatgtctgtagagagagggtggggagggggatttaatttaaagaattggctcacatgattgtggagctggagaagcaggccagcaggctggccaatcaggtaagagtttatgttacagtcttgaggattccttcttctttgggaaacctcagttgttactcttaagatcttcaactgattagataaggcccacctgcattttgaaaaacaatctgctttacccttagtctactgattgtaaatattaatcatgtctaaaatataccttcacagtaatatctagactagtgtttgatccaacaagtgggtctcatggcctagccaaattgtcatataaaattaaccattaaaccatttaaagaggacaaatggagggtggacacctacaaaggttttgttttgttttgttttgttttttgctttgttttgtttttttattgtccaaaggcctttgctgaagctgacccattcttcctgattgctttggcactgtttgctttcattcatagtaatagctatgaacttgttaaatattgctgttgtgaccttgtggtttcttaaaataataattaacaaaaaggggttgatgtctcactttgctaattttgatagtttttgaattagatgtgaattatacctgcttatttttattcaaagctgttttaatattttacataatgtttttatgaaatgactggaggagaatgcttcagaatagcttgtctgccaaggctacagtggttctcctatggaccttgccacaacaataactttataattactcaacaacttgctatttctcttgctccagaataaaccatgaagggtttgtaaaatggccagagaatttgtgaatgctttgattcttgggaagctgcaaggactgaccactgatcactattgcagtctagtagtagactgcaatagagtggctgctatatcccagcagaaatttaattttggccttgtgaagatatttgaagaaggaggaagaactctgcaaatttccatgctgaaaaatgtcaaagtgaaacatttatcacttcttttttattgacatgatattcaacctgatgttcacctccttacgttttgaatttttttctaattttggaaggattacttgctgattatagaaactataacttggaaaacactgaagacatatgaaggagaataaattgaaaatgatgactatgatcagattgtaatgtgattattaactttttagcatttccttcccctctcctttctgtgattttttttaagtaacagagattgcattgattacatacttttatgtcttgcatttttgtcaggtgacttaacaacactttccaatgacaataatcaccctttataaatgttatgtttattgtctgtacaatatttcatcatatggatgtgtcacatttaacttgttttgagttatttctttttggaatctttgggtttttttccatttcttttccattgtagtaaataatgctgtagtgaacagctctgtgaatgaagcttttctgtttcttcagagtgattttttaaaaaggtatttttctggtcgcttttgaattctaggattatagcattttcaatgggccctacatgctttgggtcctgagattggtcagagagggcccaaagatcagcaaaccctgaagatcttcacggaaggctgagctacttgcaaagtagcaacaaaaagccacttcctttttcttattttttttaatttttatacttaagttctgggatacacgtacagaacgtgcaggtttgttacataggtatacatgtgccgtggtggtttgctgcacccatcaacccgtcatctacattaggtatttttcctaatgctatccctccccttgcccccacccccaacaggctccagtgtatgatattcccctctctgtgcctagatgttctcattgttcaactcccacttattagtgagaacatgtggtgtttggttttctgttcctgtgttagtttgccgagaatggtggtttccgactttatctgtgtccctgcaaacgacatgaactctcttttgtatggctgcattgtattccatggtgtatatgtgctacattttctttatttggtctatcactgatgggcatttgggttgattccaagcctttgctattgtgaacagtgctccagtaaacatatgtgtgcatgtgtctttataatagaatgatttataatcctttgagtatatacctagcaatggtattattgtatcaaatggtatttctagttctagatccttgaggaatcaccacactgtcttctacaatggttgaactaatttacactcccaccaacaatgtaaaagcattcctgtttctccacatcctctccagcatctgttgtttcctaactttttaatgatcgccattctaactagcgtgagatggaatctcattgtggttttgatttggatttctctaatgaccagtgatgatgacctttttttcatatgtttgttggctgcataaatgttgtcttttgagaagtgtctgttaatatcctttgcccactttttgttggggttgtttttttcttgtaaatttgtttaagttccttgtagattctggatattagccctttgtcagatggatagattgcaaaaatgttctccaattatgtaggttgcctgttcactctgatgatagtttcttttgctgtgcagaagctcttaaattagaccccatttgtcaattttggcatttgttgcaattgtttttggtgttttagtcatgaagtctttgcccatgcctatgtcctgaaaggtattgcctgtattttcttctagcgtttttatggttttaggtcttacttttaaatcttcaatccatcttgagttaatttttgtataaggtgtaaggaaggggtcaagtttcagttttctacatatggctagccagttttcccaacaccatttattaattagggaatcctttccccattgcttgtttttgtcaggtttgtcaaagatcagatggttgtagatatgtggtgttatttctgaggcctctgttctgttccgttggtctatatatctgttttggtaccagtaccatgctgttttggttactgtagccttgtactatagtttgaagtcaggtagcatgatgcctccagcttcgttctttttgcttagggttgtcttggctatacaggctcttgtttggttccatatgaaatttaaagtagttttgtctaattctgtgaagaaagtaaatggtagcttaatgggtatagcattgaacctataaatcactttgggtagtatggccattttcacgctattgattcttcctatccatgagcatgcaatgtttttccatttgtttgtgtcctctcttattttcttgagtggtggtttgtcattctccttgaagagatccttctcatcccttgtaagttgtattcctaggtattttattcactttgtagcaattgtgaatgggagttcactcatgatttggctctctgtctattattagcatataggaatgcttgtgatttttacacattgattttgtatcctgagactttgctgaagttgcttatcagcttaaggagtttttgggctaagacgatggagttttctaaatatacaatcctgtcatctgcagagacaatttgacttcctctcttcctatttaaataccctttatttctttcccttgcctgattgccctggccagaacttccaatactatgttgaataggagtagtgagagagggcatccttgtcttgtgccagttttcaaagggaatgcttccagctttcgcccattcagtatgatattggctgtggatttgttttatatggctcttattattttgagatatgttctatcaatacctagtctattgagagtttttagaatgaaggggtgttgaattttatcagaggcctttgttgcatctattgagataatcatgtggtttttgtctttggttctgtttatgtgatagcttatgtttattgatttgcatataccgaactagccttgcatcccagggatgaagcagacttgatcatggtggataagctttttaatgtactcctggatttgttttgccagtattttattgaggattttcacactgatgttcatcaggaatattggcatgaaattttctttttttgttgtgtctctgtcaggttttggtatcaggatgatcttggcctcataaatgagttagggaggagtttcttcttttctatttcttggaatagttttagaaggaatggtatgaactcctctttgtacctctggtagaatttggctgtgaatccatctggttggtcctagtctttttttttggctggtaggctattagttactgcttcaatttcagaacttgttatttgtctgttcagggatttgacttcttcctggtttagtcttgggagggtgtatgtgtccaggaatttatacatttcttctagattttctagtttatttgcctagaagtgtttatagtattctcggatggtagtttgtatttctgtgggatcagtggtgatatcccctttatcatttttattgtgtctatttgattcttctctgttttcttctttgttagtctggctagcagtctatctattttgttaatcttttcaaaaaaaaaaaaacagcccttggattcattgattttttccaagggttcttcatgcctctaactccttcagttctgctctgatcttggttatttcttttcttctgctagcttttgtacttgtttgctcttgcttctctagttctttcaattttgtgatgttaggatgtcaatcttagatcttctgcactttctcctgtgggcatttagtgctgtaaatttccctctaaacactgctttagctgtgtcccagagattctggtacattctgtctttgttctcattggtttcaaagagcttatttatttctacctcaatttcattatttactcagtagtcattcagcagcagattgttcagtttccatatagttgtgcagttttgagtgagtttcttaatcctgagttctaatttgattgcaccgtggtctgagagactgttatgatttctgttcttttgcattgccgaggagtgttgtacttccaattatgtggtcaattttagaataaagtgctatgtggtgctgagatgaatgtattttctgttgattcggggtggagagttctgcagatgtctattaggtccactcggtcgagagctgagttcaagtcctgaatatccttgttaattttctgtcttgttgatctgtctaataatgacagtggggtgttaaagtccccactattattgtgtgggagtctaagtctctttgtaggtctctaagaacttgctttatgaatctgggtgctcctttattggatgcgtatatatttaggataattagctcttcttgctgcattgatccctttaccattatgtagtgcccttctttgtccttttttatctttgctggtttaaggtctgttttatcagagactaggattgcaacccttgctttttttttgctttccatttgtttggtaaatcttcatccatccctttattttgagcttatgtgtgtctttgcaagtgagatgggtctcctgaatacagcaaagggatgggacttaactctttatacaatttgccagtctgtgtcttttaattgaggaatttagcccatttacatttgaggttaagattgttatgtgtgaatttgatcctgtcattgcattgctagctgattattttgcccattagttgatgcagtttcttcatagtgttgatggtctttacattttggtatgattttgcagttgctggtactggtttttcctctccatatttagtgctgccttcaggagctcttgtaaggcaggcctggtggtaacaagatccctcagcattagcttgtctgtaaaggattttatttctcctttatgtgtgaagctttgtttggctggatatgaaattctgggtggaaaattcttttaagaatgttgaatattggccctcactctcttctggcttgtaaggtttctgcagagagatctgcttttagtatgatgggcttccctttgtgggtaacccaacctttctctctggctgcccttaacattttttccttcatttcaatcttggtgaatctgatgattatgtgttttagggttgctcttctcaaggagtatctttgtggtgttctctctatttcctgaatttgaatgttggcctgtcttgctaggttggtgaagttctctgagataatatcctgaagtgtgttttccaacttggttccattctccccatcactttcaggtatactaatcaaaggtaggtttggtcttttcacatagtcccatatttcatggaggttttgttcattccttttcattctttattctctaatcttgtcttcacactttatttcattaagttgatcttcaatctctgatattctttcttcacttgatcaattcagctattgatacttgtgtgtgcttcacaaagtcctcatgctgtgttttgcagctccctcaggtcatttatgttcttctctagactggttattccagttagcagttcttgcaacctcttatcaatgttcttagcttccttgcattgggttctgaagcctacttctgtcaattcgtcaaactcattctccacctagttttgttcccttgctggcgaggagttgtgatcctttggaggagaagaggcattctggtttttggaattttccgccttttgcactgttttttccttatcttcatggatttgtctacctttggtctttgattttggtggcctttggatggggtttttttttaatatatactttaagttttagggtacatgtgtacaacgtgcaggttagttacatatgtatacatgtgtcatgttggtgtgctgcacccattaactcatcatttaacatcaggtatatctcctaatgctatgcttccccgctccccccaccctacaacaggccctggtgtgtgatgttccctttcctgtgtccatgttttctcattgttcaattcccacctatgagtgagaacatgcgatgtttggttttttgtccttgcaatagtttgctgagaatgatggtttccagcctcatccatgtccctacaagggacatgaactcatcattttttatggctgcatagtattccatggtgtatatgtgccacattttcttaatccagtctatcattgttggacatttgggttggttccaagtctttgcttttgtgaatagtgccgcaataaacatacgtgtgcatgtgtctttatagcagcatgatttataatcctttgggtatatacccagtaatgggattgctgggtcaaatgttatttctagttctagatccctgaggaatcgccacactgacttccacaatggttgaactagtttacagtcccaccaacagtgtaaaagtgttcctatttctccacatcctctccagcacctgttgtttcctgactttttagtgattgtcattctaactggtgtgagatgatatctcattgtggttttgatttgcatttctctgacggccagtgatgatgagcattttttcatgtgtcttttggctgcataaatgtcttcttttgagaagtgtctgttcatatccttcgcccactttttgatggggttgtttgtttttttcttgtaaatttgtttgagttcattgtagattctggatattagccctttgtcagatcagtagattgcaaaaattttctcctattctgtaggttgcctgttcactctgatggtagtttcttttgctgtgcagaagctctttaatttaattagatcccatttgtcaattttggcttttgttgccattgcttttggtgttttagacatgaagtccttgcccatgcctatgtcctgaatggtattgcctaggttttcttctagggtttttatggttttaggtctaacatgtaagtctttaatccatcttgaattaatttttgtataaggtataaggaagggatccggtttcagctttctacatatggctagcaccatttattaaatagggaatcctttccccattgcttgtttttttcaggtttgtcaaagatcagatggttgtagatatgcggaattatttctgagggctctattctattccattggtctacatctctgttttggtaccagtaccatgctgttttggttactgtggccttgtagtatagtttgaagtcaggtagcatgatgcctccagctttgttcttttgacttaggattgacttggcaatgcgggctcttttttggttccatatgaactttaagtagttttttccaattctgtgaagaaagtcattggtagcttgatggggatggcattgaatctataaattaccttgggcagtatggccattttcacaatattgattcttcctacccatgagcatggaatgttcttccatttgtttgtatcctcttttatttcgttgagcagtggtttgtagttctccttgaagaggtccttcacgtcccttgtaagttggattcctaggtattttattctctttgaagcaattgtgaatgggagttcactcatgatttggctgtttgtctgttattggtgtacaagaatgcttgtgatttttgcacattgattttgtatcctgagactgctgaagttgcctatcagcttaaggagattttgtgctgagacgatggagttttctaggtatacaatcatgtcatcagatggggtttttgagtggtcctcctttttgttgatgttcatgctatagctttctgtttgttagtttttcttctaacagtcaggcccctcttctgcaggtctgctggagtttgctggaggtgtactccagaccctgtttgcctgagtgtcaccagtggaggctgcagaacagcaaagaatgctgcctgctccttcctttggaagatttgttccagagggtcacctaccagatgccagccagagctctcctgtatgaggtgtctccctgtcaggaggcacggggtcagggacccacttgaggaggcagcctgtcccttagctcgagcactgtgctgggagatctgctgccctcttcagagccggtagggaggaacgtttaagtctgctgaagctgtgcccatagctgcccctttcctcaggtgctctgtcccagggagataggagttttatctataagcccctaactggggctgctgcctttctttcagagatgccctgcccagagaggaggaatctagagaggcagtctggctacagaggctttgcggcactacgttgggctctgtccagtctgaactttgcagcagctttatttacaccgtgaagggaaaaccacctactgaagcctcagtaatgatggatgcccctccctccatcaagctcaagtgtcccgggtggacttcaaactgctgtgctgacagcgagaatttcaaggcagtggatcttagtttgttggccccatgggggtaggatccactgaacaagaccacttggctccctggcttcagctgcctttccaggggagtgaacggttctgtctcactggcattccaggcaccactggggtatgaaaaaaaactcctgctgctaactcggtgtctgcccaaatggccgcccagctttgtcttgaaacccagggccctaatggtgtaggcacccaagggaacctcctggtctgcaggttgcaaagacagtgggcaaagcgtagtatctaggctggatagctctgtccctcatggcacagtccctcacggctttccttggctaggggagggagttccctgaccccttctacttcctgggtgaggcgatgccccaccctacttttgctcaccctccgtgggctgcacccactatgtaaccagtcccaatgagatgagccaaatacctcagttggaaatgcagaaatcacccgctttatgcattggtctcaccgggagctgcagaccagagctgttcttattcggccatcttgcccaggaatcgaaaagccacttcttaaaaagagccatcactggctgggtgtggtggctcacgcctgtaatctcagcagtttgggaggccgaggcaggtggatcatgaggtcaggagattgagaccattctggttaacatggtgaaaccccatctctgcttaaaaaaaaaatacaaaaaattagctggatgtggtagtgggcacctgtagtcccagctactcaggaggctgaggcaggataatggcgtgaacccgggaggtggagtttgcagtaagccgagattgcgccactgcactcctgcctgggcgacagagggagactcagtctcaaaaaaaaaaaaaaagaagaaccatcactgtggattgagagggttgaacttcagaggatgctgatcagaggagaagagtgtctcatctcataatggattaactatggcttagttaatccaccatgaggctagtggatccagcactcaaagaactcctattccgggaaagtaaggtagtagtgaaatggaaattgccttgcttggggtgttcatgttcctcattgacagtgacccctagcaaggaggatgaaggcagactgttgctatcttagaatctcccatgtacagctgtttacatcatttctactcacagccaaagtataaaaagggcgcatgtcttacatagttctgtttactctttaaaataaatcagtggtaaatatgctcttcatccattagtctgaagaatcctcagattgccatatttctgcataaaatgtggtgaggcaagcttgtcctcacccctgagaggtgtcattactctagaaacctctgatcaggatgaaagtgggatttaggggactgaaatatctcctgcacctgacattttccagtctagcaactttggtgctggttcagtgttggttctagagcaggcagatctcaactgaaagtcatctgccactactgattagctgtgaggacagctgcttgacctcactaggcccatttcctcctctgtggcatggatatgtaatgcctgcttcacagagttgtttgaggattggataaagataatgtacttatagtagtttgcacattacttgacatgtagcaagtttcattaaatgcaggtgtttatttttattaatgtattgggcccatatgatctgaaaatcagtgtcctcatatatgaaatttcagtgcaacattgggtgactctgtcatgctgaatgtgtatcaactccaatgggaatggaaccacgttcagctggctgaagaagagacctaaagacatgggattttattaggggcttgcatacagtgggaagagttccgtggtggcaggctgggcagaaaaaccacaactgcttgcaaacagcatggagtttatatagcattttcacctatatcctcccccttaatgacctccacctggcaagagtgatttaattcaaaactcaggacctcaagcccctgtgcagcctgtgttccatgggactggacaggggctcagatgttgctcatagacaaggaatggatctcctgattccctagctcagaactcacattcagggatgtctgccagagtcattctcagggtatgcttaagctattgctatcaggtgcatttaccatacaggcttttccctgatgtcttttctgtgaccactactaactggtgttagaataacaagacacagctagaggtgatatgataatacagctcttaaagactttattcattaggaccctccctctcttcttatttcttcacattttcttttatttatccttccttccttccttccttccttccttccttccttccttccttccttcctttctctttctttctttcccttccttccttcctttctttattctttctctttttttttttttttgaaacagtgtcttgttctattgcacaggctggagtacagtggtgccatcttggctcattgcgacctctgcccctgggttcaagcaattctcatgcctcagccacttgagtagctggaattaaaggtgtgtgccaccacacccagctctaattgttgtatttttagtagagagggtgtttcactgtgttggccaagctggtcttgaactcccaacctcaggtgatccacctgcctcggcctcccaaagtgctgggatttcaggtgtgagccactgtgcccagcctcttcgcattttcattacctattctgtgtctagtaccctggtaagtgctggagatattaagttaaacaccattcgtaatgttaaatcatccatgtggccaattagttgtcacgttactaacatatatacacatgaattaaagcacatgtgatgatgctctctcattcatctgtgcacatcctaacaattcacaggccagaagggctctttattctctctttaggttgttttttattttcttgcttttttaaatttttcttttatttttttgaaacagagtcttgctctctcacccaggctggagcgtagtggctctgctggatctgctggagtgcagatcacggctcactgcagccttgacctcatgggctcaatcagtactcccacgtcagcctccctattagctgggactacagacatgtgccaccatgcctggctaatttttaaaatttttttctagggacagggttttgctatgtttcccaagctggtctccagctcttggactcaagcgatccacctgcctcagtctttcaaaatgctgggattacaggcgtgagccactgtgcttggcctctccctttagtttgatacccaaagtcctgtttgccttgctacagatccctttgttaagggacaggtttctaccctgtagacttcagacactcagctcagtatcattccaaggacctagctcttccactggtccatagcgccagtacctagcactgtttcttcagtggtttggttggcatcagggaccactcttcttatgtgcaaatatgaaaatcttcatctcagatcctaaagcaaggtctcatcaagacaagcctctggctcgatgccctgtgccagctttggggtccatctgttccattttgaactctgagtttccaatttctgacaggcccactttgatattctggttcctgctctgtgttgttttgcttcctgagtacaagccagggtggtgtgacgtgttgcacagcagccccagaaagaaatatcaagataagacatactgatttattttacacttgccatggaagcctctagaaattttagtcttccatgaaaaagttttatgacattttcctagtgctgtctcaagccctgtctttggatgtttagttaatatttatgctggcattctcatcaattgattgatccctgagtagtaatagcaatgacatttattcaatgtgttgtgattttttatttctgtctccagtgagacagaaataggatgaaatcttgaaatcttatttacctaaataatgttctaagcaggcagcaaataaactctcatccttcttttgaaggatgcaaggggcttgaaaagcaacatgtgaaatatttaagctactcttaacatcttgtggaatatcagagttgaatatgttttggtagtaatttaacccaccttcattcattttaaatgtgagaaaaggccaagttagtttttgcccagtattaattacacagtattaattgtcagcagaagagccgaattcaaatccatctctccttattcgctgcatgaccttgggcaagctatttaacttctctaagcttatgtgtcctcatctgtattaaagggggaaattatctcaatctagtttatagagctattttaagtaaacaaaatgaggttgccagtgattagtacacttgaaatatacactcaataaacattgttatgatggattgtagagaaggacatggagaaatccactctgagctaggcttcaaaaaaggaatcaattttcaacaggtgtcagtgatgggttaggatattccagtaaagaagagacagaggcagagaattgagggtcttaatgggaacactgggggtaatccagcttggcttttccgtgtagtgcatgaatcgaagtagtaagagacgagatctcaaaaagcagttgaaatttgatcatggtcagtcttgaatgccagaacatggaaagtagatttcaatcattagtctggggatcagcatgggggtcactgatggctttaattggtgggagaaagagagacacagtgacagagacagagacagttagacctgagctaaaggaagggtaattggatgatggcatacaagagagaaaggcccttgtttttaaaagtggatgtatggaaggtattctcacagttgatgctgaaaacttgaaaatgtgcctgcctctgctgtactggcaattgtgattttagaaaactttgcagatataatgattaaaaaacaagaataatgtaaatatctaaaaagggggacttggttaagtaaataaacacatgttaagtaagaatttaaaaataaaataaagacatgttaaataatttcatgtcatctagccattatggatgatgttatttatcaacatagatcctttgtgatctatgattttaagtctaaaatattagaatagtgtgatcttatttaaaaaatatgtgtacttgagaggagttatttcttcattcaaagaagtccagaaagggtatgaatcaaaatgttaaacaatagttatccttgggtggttgtgtcacagaggattctttttattgtagtaaaatatacatagcattacatttactattttaaccatttttaaatgtgcaattctgtagtattacgtacactcacattattgtgcgactatcaccagtttccatctctagaatatagttctttttaaattcatttttaatgtattatttgaattttataatcaaatcaatttcataatcgaaacaattttggttaaataatacaaagtagagatttgagactaggatattattgctgtgatgtgggaaattacatgctaactcaaggtcaggacagttgcaatagaaatggagtgtaagaaaagagagaagaccatgttgtctaatgtttctatttacaatgttttatccccatgtagtagatggtgcttttccacaaggtaaagtttggactccaagttgaaagtaactggatttaaaagttattggggacctgtaggcttctactgtgcaccagtagattgtagtaccatgaaaggtttggctacaccaccagatccatgatcaggtttggtgtttacacaatcattccatctcaggcatccaagtgacacagatctggttaaggttacatgtgtgaggaaaacatacaggcagaaattcttgtgttggcagatcactgactatgggagaggcttactttgtttttgcaaaagcatcaagaatttcaaaatcaatttcattctgtgtattattggattctctgatgtctaaattccttcacttacaggaaccgttgttgcacaaatattaacagaaggccacaaagtaatataaaaaaacccacaatttttaatgctcttttaaaaaaacaggccagtgcctctgatctaaaacagagaattgagaatattttagcattttcctctcatatgccatgtcttattaggtacacttactttcatattccacaatatgaaagccagaactctccctataagataagaagaaaaattcctaaggaagcatccttcaataagaaacatgtggttttatttagggctgtttttgaagtttaccttttttcagcagacatttaatgaatgtctaccacagagaagcacagttgctctggtgaatgcaagaatggatatgacagggtgtctgcctttcgggagctcacagtttagtccctggattgcagtggaagtaaatatattaatacatgtcactatcctcctactagacctgctaaaggccaggcatggtggcttacacctgtgatctcagctctttgggaggtggaggcaggaggatccattgagcccaggagtttgagaccaacctgggcaatatagggagaccctgtctctacaaaaacttcaaaaaggaaaattagccaggcgtttgtgcctgtggttctagctattcaggaggctgaggcgggagggtcacttgagctcaggatgtcgaggctgctgtgagcgttgatcgcaccactgcactccatcctggatgagagagtgagaccctgtctcaaaaagaaagaaaaagaaaagaaagaaaaaaaaaaaacctgctgaagctggcaggtatcaaagtgaagcctgctattaaagagatacacaacattctccctggggattggctaagggttactggtggagggaaggttagtattgagcactgcaggatgggtagttttgaggaggtggatctgagtgagaggtgtgttctagatggaaagtaccgaagagtaggagtattggagatctacaggatggtgttgggtcttaccttgggttctgccagttgcagaggcaaggattgggtgcaattagtttattagggatggtcctggaagcattagtaggggagtaaaggagcaaggcagggaaaggaaaggagtcagtaaattgtttgttattaagccaatgaccactgtgggcaagtggagccagtgctgctgggagctctgtaaacagtttgtaacatcctgcagatttatcccaaccaaggggcaagaaagccactgcctgtaactctcagatcatcgttgggttgagaactacctctaggagcattactgtggcccttccagagtgccctgaatagtcagagtgtgcttctgtggctagaattgcaagctctcatatgtggcgtacatagttagagccttcagcctatagagaagaaagggaatagaatgttgagggctgcttccattcaatgcatggtcagtggtggagatgtcaatcaaagaaaccaagaaggaagaggacagagataaagtagaatgccatgaagtgttttgggaggcggtgaaagggagagtttcaataaggagggaaaattgaaacgaagataatattttaccaaagggttagtaataattgtgctttccaaccccaaactttttaaacatgcattaacctgagaagtataatggaataggcttgcctttgtaagttggttgtagggtcgtagttctggctatgctattcactagccatgtgccctcaggtacattccttaacctgactgggtctcagcctcctgtggcataaaacaaaaccattgtttccaatctcttgcagcactaagatgcaattcctgtgagttcaaagatgtgacatgactcctgtctcactacttgtcatttattaagttcataagtgtattgcatgttaaacagagaagtaatctaatttcacagttaaatataatgctgatttaaattacttttgaaattaaaatgttaatggaataaataggctgtcctcccggcttcccccacattctttgaattctctacattgtatcatctctgtctgctcctgtttctccacctcatcttagactctagaactatttttatttagtgttggtttacttttatctgtggctgttttggcagcaggaattatatccatttgcctgacacagagttttacgtggatcatgtgtttgaaagattaatataagcagttgcttctgaaacaatttaatcttgctttccatagtaatgaaaaatgaataatcaaaagcagtaaattgtgtctggaagataataaatacttcttatagcattttagcaccgactgtgaattatagccgacccgcagatcgggaggggtgagtatgaccaactggaactccacagtgtgtgctggcctttaatatcaggctttagctgcttgattcatttcattgctctctatcaatacctggagaatctgctgtctgtcccactgatttaaaactaaaaacaaaacaaaacaaaacaaaaaaactaaacaattagaggagtctctgtttaaaacaccacaaaacagattttctgtctttctctcaaccaacacacaagcctaagtggacctaggtaagaatttcaaacgtaaatagtaacaacctgaattaattctagattcaggcactacagggaagctcctagggatgggtcttactcagaacctcatcaacttcttgcaaatggttgctgcttgagtgaaatctggaaggatacccccaagacttagtcttaccttcaaatacccactttcagcagacacgttcacgactcaggagctactcaagaagggacagcttttaaaaattagtgcatttctctaatgaggtctcctattgaagccctaaaataaatgacttcctttttaagtgcaaaacttaagaaatatatattttatatatatatatatatatatatatatatattttttttttttttttttttgagatggagtctctctctgttgcccaggctggagtgcagtggcttgatcttggctcactacaagctctgccttctgggttcacaccatttccctgcctcagcctcctgagtagttgggactacaggcacccgccaccacgcccggctaattttttgtatttttagtagagacggggtttcactgtgttagctaggatggtctcgatctcctgaccttgtgatctgcctgcctcggcctcccaaagtgctgggattacaggcatgagccaccgcgcctggccaggaaatatatttgagcatggtattcagatttctaaatagtaataaaaataataagtatataaataaataaataaactaataaataaaatgcatctatagcctccctgctgtgatgaaacttaaaaattacttttcaaatgtagacttaatgtactctgtaaagtagcagtcaggcacagacaccaagagtttccttcagagctgatggcaaagggaattcaggtgtgacttgtgcaggtccggcttcatcactctgtttatctgcctgaattgaatgtgctttaatgtgtttatatttgcctgctagtctggtgtccaaaggaccatatcatcacaacccccaaacaggacattgtctatgtcttgtgtactgaaaggaaccccaaatgacaggttcatttttttttatgctacctattagttgagatacatgagctaaggtgcttaacctcactgagcctcagcatcctctaaaatggtgataaagcttcccttcttttctatttctaaaatatgtttttaataacaactgaaaccgtgcatgatatatgtaaacccctttaacaattcgacacgataagcaaacacaaggggtggttaatctacctgacaaatgctgatttctcttatgtctgttttgattctattttaattacgaacataactatttcaaatgtctagtcaagagatattttcgtgccttatacttttgcatgagtttgtgttttcaaacttagaggtgcaattaggaaatctaagtcaatgagagaaaaatcaagtgagaaaaccagtcttttgagggaggagagattcttcctagtttattgtttctaaaaataagctttcctaatttagcacagctgttgaggagcagcaatgggatgtcagtagctgaaagtccccaagcgcacactgtactgtattgtcaaatccttgcagaactactgagaacattcctggcatatgggttttgttctaacaacttaacacagctcaatttttaaaatctgcttttatagaaatgttcaggttctcctggattcttttgaactcttgccagtaagtgatttaagcccttgacttggccatgagaacagaagttaaacaccaaagatgaataaccatgtggtctcttacacatgagaattgtccagttaattttttaagtcgccaagactagtctggcagaaagtatgtattttatttttgtccttaaacattacattttgagttatctcctgaagagattttgcaagaaactgatctattctgtgtggaaagatggctatttctcagcgagtacctcacttcaaatcatttgttctgaagtgtcatggtgtaatgaaaataataagaagcatgaggagatggttacgaaggaggaggtaggaggaggagtgaggaggaggagaagaagataaataagaagaggaggaagaggagatcataatgatgccttataaattgtttatttttcatcatttacaaaatggctttatgttttagaatctaatttaaaacttaaaacaccccagtgggagaactgatatcacaagtgaggaaactcagtttcttggacagtgtttcctatgcatcatatagcttaaaagagagctggtatttgaacttccaattcaaagtctgacatttttttctaccaaaatttgattccaaatcttaattcatatctctaaatgtatgaataaaatattgtgaaccatataaatgagagtatcttctctataaacctggggaggggtggtggttgtgttcctttctcatctgttgttttcaaaggcgagtcatttccagttttcccttccagaagtgacatgctcattggggatttactcaatccagttacccagttaatcaagaagactgagcccccagaggttaagtcacatcattatgaagaagaagatcagaagatctgaaccccggtctcctatcctttcatttgtactattatattgtcatgtaattcaccttttctcaacaaatgtgcaagtgctaaacagtgtgagtttacattatgagcctattgataaaacgtcttggaccagtgtcctgcgcagagtgagtgctatatagaaatttgataaatgaaataaataaaaaattgtgttatgagaagaaagaatgaaacatggtaagtttatttagagtccatctcagacgtaggaggacatatccaccaagctcccaagaaggaaaatactttaatgatattaatggatattactgggggggggggaaaacatacagtttatattattttcttagaagcacactaatttttaggactagatggatcagttttatagcagtcaggacatctgattgtggcagctgtcaatgcatatgaccttctccttcttcaagacacatcaacaggaagttagcagaaactacacatttgaaatgtaatgactacaaccctttcaatggcttccgtcttagaagaaaaaagttctgtcattttgatggcacacaataaattccaaagccacagtttgttaaagtcctaacctccagtgcctccaaatgtgactatatttggagacagggtctttaaagagcaaattaaatgaggccattaggggaaaatttgtgctcaggcacaggatatgaagacatgggtagaagatagccaagaagagaagccacagaagaaacgaaatctgctgacctgacactgtgatcttggacttttaacctcccaaactatgagaaaataaaatacgttatttaagaaactcagtctatggtactttgttatggcagcctaagcaaactaatacactaatacactgttgtacgtcagtagctctcaagcccagctgtgttttagaatcactttagaatttttttcaacaatgctgatacagctccatcccagagcagtggaatcatgatctctggggatggggtttgggtggctgtgttcttcaatgctccccaggagattccgatactgtttgggttgagaatcactggttttcattgttctcccagaagagttcccaactggttcctttcaaggaggggaaaaaaaatcttccatccactgtctggcttgttgaagcacattactcagagaacagagggagccaacccatatggatcaataatggtccactgtgactcacccttagaatcatctgagtatctatgtttaagacaacctatgagtgattctaatggtaatttaggttaagaaaggcctaatatttgttttgcatatatgagtgtatatatgtgtgtatgcattgtcttcaacaaggaaaaattacctataagtccatcaaggagcctgttcatttttgggggggtgcaggggagcaggtggtggtctgtggttgtttccttgggtctttttttctttattattctcttcaatgatgagagtgttcaggacactgggattgattttaacaagtaggtgtggaatttcacagtttggtgttttgtagttatgacctcaggttaaccagtattttccctttctaaaacctgctgttagagcaaaaagtcagatgctaacaaattatgttcacaattgaagtgaaaattggactcttaattcgtttgctaatcactcctatttatgaatatattaatcagcctccatggggaatttatctgtcatgtgcagtcaaatatatatgcaatatttcattgacctaaagtcactgatcctcagcctaaacaagttaagatcatgttggaaaaaagaaacgcctgtggcatgtcaaactagatgtcaagctaataactaccacctgttgtgaatgatactatgtgcttacatgcacaatcacaaaatagccctaggtgatactattccctagtatacatgggaatgtgttactattcccattttacaggtgaggaaattatgatcaggtgagagatgctgggcaactcagtgatcctggactggcatgaaggaagaagccctttgactcctcagctcaagctcttaacaattattactctctgctgagctatggcatatccaccaactcctcaatgagatacttcacagattgttttattctcttttggtcctaatagcaagtttggtttttggattttctaaccaatatcaagttagaataagcttctcaataaaaaaaaaaaatcaaaaccacaacttatgaaataaacatttttcaaggtgattgattcctttacaaaattttattttcacttaaaagaagacatactaccattttcttgaatataaggagattctgtaatacatgtttccacgcattaaattgtaaagatatctatatgcctataggctatattcgtaatcccaccctaatggaaaaacaggatcttctagtttttgacctgttggtgtctttgtatcattgaaagtggaaatgagtatttttaatattaagttttacaccaagcaaaactactttctgtagttccaggtagttctaggtagtcatcagaggaaatatctgcaaatagtcatttgagttgatagatttgaacttgcagttttatatctttgtatttccaacactgtctacctcttaaaattacctggattataagcattctgaggttgattaccctgtcaaaaatttacctctaaatctgcaggagttcacatactacagaacaaattagccaaaaagtgttgattgaatgtagcctaataattgttattaaatatcctctaagtaactgaaaatgatacacgtgtgtgccatatgtgtgtatgtatgtgtacatatgtgtgtgtatatgtgtgttcatatatatgtgtatgtatatgtgtgcgtgtgtgtgtgtgtgtgtgtgtgtgtgtgtgtgtacagtggtttcaagcacatttttcagagttaggctgacttagaccaaaattcttgctccacttttcactccctgagtcaccttggggaagttacttaatctgctggagtcatacctttttttttcctgtaagatgagaacagtaatgcctacttggaggtggagattaatgacagaataaaggtggagcacttcaaggtgtgccatcctggcccgctgaatgtgtagtaagagctaagcaatattatagtattaaacaattaaacaccattctaatgaatgtttcattttccccaaactgaactacagtaattgtacaaagtaaggtaacacctgtatatttgaggacaatgatggtaacagcacaaatgaaatttccctggtcttacttagaagcgcttttcttttgctgaatctttgtgaggttcccctgtgtcctgatgtgagcaagaccacctactgctgtgcgccaagaccagtagtcagggatgtggaaatgtttttggaagaagaagtggaacgagaagaaccagaatggcttcttttatccaaggctaatcttgtgagcagtaggagggaaagtcaggcctgtccaaagcagcttgagcctttctttgcagaagggtagatgctgaataaaaacttgcaaacacagtgacaagaaggcaggatccagaattaggttcaaattgaccctaagtttttaaaggtcattctctagcttgggagagaacctgggaaaggtggcagagtgaagtcactctgggaccacatggccgggacactgatggctcagccccttactagctgtgtggcctcggacaagtctttatgcttttctgtggccagttcccttaatgtaaactgtgattaaaatcacacttaccttttagagttgttgtgaagattgagtaaattaatttatgaaagtgcttggaacaacataaggcaaaaaatataaggattcattaactgttagctgtcataatctacgtatctcaaaggctgaatggtcagtttttctctctccaacatttttctccctctttttttcatgattgcatctgaacttatgtgcatttctatttaagaggtgacacttgccagtgtgtggttttctgggtgcagacaaatgtatggcattatgattgataggtcctaagactgttctgtcattaaattgtggtcatggaaacagtaacttttcatattaagactgacttatcattcttactaatctttaagatgcaaaatctatattataataagcatgggttagcacagaacacatttgcaggcagagaacgaaaacatttctgaggttagagcatgaattagtttttagaaaaggtgtttgctcaggattcaaatagcatttcttgttctctgtgataaactttttggagtttttgataggtctggactcccccacagccttcattaatttatcttccttgttgcctgctgaaagtgtgctgggaaaacagaactggtgctttcacgtttcctttctccctgctcttttgcattcagaatcttagggatttaacttgtcactaagccccatttagagccactgatctctgaattctgctgtttggtttttcatgctgctattctagaatatgctacaaggctcacagatgttgttatccaggaaattccaaagggcagcatggggctgctcaggtgccaacctctgtctccagttgagatgtgtgtggctggctgacattttatgccagggcctcttgtgttgccgattcagccaacatttagtgaaatctcacactggcccgggctcaatgctaagaagttgcagatgccttctcatttactcctcacaatatcctcatccctattttgcagactgctgaggagcccgagcaatgccaataaaaaagcatcactcctctcagcctgagtactgaacaatttgagaaataaagtgaaagaatacaggccaaagaattgtatttatcaattagaaatgctaagttggtggatgcaggttagtgtcatagccaaatgagcatgtgatggctgaatctcagaactaggcagatgtacgcaccagtcacacagaagtggaaacttcctcacttggccccctgacccaagcagcatctgagctctgggaggggcagtggaatcgggttccctatgagtagcttaatcccaagacaaagaagtgtagagctgagtgcagtatacctggttattcttcccaaatgcactaactcaatgagtcacccctctccctccttagaaatgaatagaatgggtcaagtgttggggagaggccaggagtgcatttagggaacatacatcctcatgaaaatcagtgtaggttgttcagatgaggaaactgaagcatggagaagttcagtaacttgcaaaggttacacacatccttagcagtggagctcaaagtttaatacagtctttgtacttatgtaccttatgctgaattggggcttttctcagaattgaaaaaattggaattatgacataggaaagaactgtggaaagtcattcagcctccagaattcaaaacgatattttatataaattatccaagaacaataggtgggtattttctcccttagattggcttcatctttactttcactgttaactttctgttgaaagttctggctgcttccccttccacaacatgggccacttccttttcttgaagttaccatggccaaccattgaacttgctttttctgaaagtgactctgacttggtacactgaagctcatgtgtcctttccccatgccttgtcttgtctaactctaactacctccttagccagaggccaatgctgcccctgcaccaatcggctttgacaactgtgtatacggcccctgcctgacctgcctgtactcagcgttggcagcctcgttgaggtttcattcattgccttcaggccctgcttctaaaaatttctccttcttttaaatgtggttaacatgatgtttaatatttaaaattaacaattttgcatttttaaccttgacattggatggctgaactgcatcctcttcaaggacagcttgcacagccttcttgaagggtaggaccctacttcaaattgtgttcaaggtcaggtgtctgctttcctgtggctgtggggggttgggtagggtagggatttatgggtatgattcccattaggaggcttcttggaagatctttatgaatgagctagagagagggattgaaggagacataatgtcacagcctctggttcctacaaggccttggttccaacacaagactggaaacaattagcagcagcaagaatttgctgtttatggaggagtgggaggaatgaagtaaatcttgtatttggaattaaacatgggaatttggacctgtatctcaatcaggtgaatcagaagatatgctccagaagccatgaaatccctaagtctgtttacatcttgggtgataattttggaagcctaaaatagcctttgcctttgtggctatgctaaactgatactatggaacagttatagattatgttctcttgatattattaactagatgaatttgcattgtttagaaactaggctttcagtatggccccttttaattgcaatattgaaaatcctggtaaacttggacttccaaacttgggtttctctagaaatcaagaagttttaaaacagaatcctgatctttactggtcaggcttgaaatttagtttcaagataattttcccagagactatagaacagctttagtttagaattagacaaggtgattctttttttttcccctcttttcctctttgctgaacctccaatagatgagcagaaaggtttaggtgattttgcaaagtgatttttcaagcacttgactgaaagctgtagccttgagggaccttggaaagagaattgccttactgccttcttcaccaagagttacccactcgccttgtgtggtgaagaagggtttctgatttatggccaggttcattggtgggtcactctggtggagcttgtcctaagcattttaatttggatggtggagctagggaagcctcagcacagctccgcggataaggttgtaaccagccttccatgacctgtcttgtctctgattcccttgagcgagtgttattctttggactgtcaaattggcacctttggatatttctctgaccttgaaaattagaataattaagtttcctcttgcacagtggggtttgatatgcgtaattaacagcagccagcattccccagagatcacattttgtaaaacattaagggaggaaagacacaaaccttcttgaatgaagggatatggacgttagttacatatgactgtggcagtatttggatgttccttttcatgtgactgtagatatttccatgaaatttagtaatgcacattccctttatttatttttggtagctcctatcatgtgaaacagagggaagtgaataattggcaactggataatgagtggggacaagatctgaaaaagtcctttatagtgaagaagaaagttaattgtaggctacattaactttgttgcagtaaaaccaatttttagatcataataattgtgtttgtgcatttctgcatgtcatggtcccaagctatgatggtgccccacatcaactggtcacataggagtagatgcctaaacaagtgcaatgcatgtttttgagtccttgtctttttaaagacttcttcaaataactctgatcctttatggcactattttctctgaaattttctttgggcctttatacatagataggcagatagacagagagaaagaacacaatccattaggaaacagttctgtctgttgattgctcttagaaattaactgtttgctttcagccaatgggagttagaagaactaactgtgggtatactgtcaaccagtgagcattagtgttccatactgtgactgctccctgctgctgagctctcctaattaactctggattctggactctgattctggcctttatttcatggtgtgggaactgatgtcaaaaagtatgcaagtgatagtatcggactgtttataaagattaagaaagagcatcattcttgttgcaaaaacgtggattttacagtaattttagataacttcaaggaaatgatctggtaatccagcagcagagaccaataggcaattagaaattagtggaggtccttcgaaattatgaaggacatcataatgtcttgccactggggaggggttgagcaataacttaagggtggtagttggtagagaatatggcagagaagaaatttctgaagcgcatagaaaggttgttaaagtactacaatgggaccacataccctatagggatggtgctattgtgaccttatataccgtgattcagttaatgataaatggaacaaatgaatactcactcttcgatagaaaagactaaaaggtgagtgggagagtgattaagtgtatcataagcatctgtgacagtgatcctaatttggtatccctattttatttatttatattttttgagacagtgtcttgctctgtcacccaggctagagtgcagtggtgagatcacggctcactgaagccttgaccttctccccacaacctggtctcaagcaaccctcccacctctgcctcctgagtagctgggactataggtgtgtgctgccatacccagctaatttttgtattttttgtagagatggggtttcaccatgttgcccaggctgatcttgaactcctgggctcaagcaattggcccactacagcctcccaaagtgttgggattacaggtgtgaccctctacacctagcctgatatccctgttttaattactgattttcacccaacaccattcatatctttgccgattagctccacttctctcaaaaaataagtccgtattgaaaggatttgaatgttaagaaagtctccaaaagctgttatcagggcctggagtcagtgaatgagtcatagcaagacagattattactcagatgctgctttgcttcctattcaccagtaaaaccaaatgagatcagttaaatgttcatcatgtgctgataccaagctcgctgcactttaagccaagcaaaatggttgattcccctttctttgagtcttttccttgttttagtcagctttccaagttctttggccccaaatagaagattttttttgtacctatccagatttcaaattaagactagaaccattttccaattttttttttttgtaaaaaagaaagaaaagaataaaagtcacgtgggatcaaatgagtctaagaatcaatgaccactttattttttctttgagaatcaaattacatataagcatagtctagctctgagaagtccttcactaaagaaatgtactttatttaaactcaagcttttactaactatattcaacaagataaaataacttttattaagactctattgtttttggcattattttattgcctacccatcgttttttcccccaagtaacaactgttaattgtctaggtgaaatgcaaaactatcaaataaatgttcatataagaaaaacgcagtgttgtacaaccatatgtgacttgtagacctcatgatctaaatcagtgctatctaataaatatataatgccagccacatatgtaagttttttcaaggaaattcttttatttgtttttttgttaactgaaacacatttagatatacatattttcaggttacagccacatatgtagttttatattttccagtaaaaaagacaaaaaaggtaaaaataattgtaataaaatgttctatttaactccctatatccaaatattatttcaacatgtaatgaaaattaaaagttattggtaagatactttacattatttgcctactaagtcatgaaaatccagtgcaaatttacacttaaagcacacctcaatttagactagttccatttcaagaacttggtagccacacatgactaatggctaccatttgggatgatgcaggtccagagtaagctgcaatgcaaaaagtatgcaagtgatagtatctgactgttcatgaagattaataaaaaagtatcattctagttgcaaaaacatggattttatagtaattcttcttcccacgagtatagtgcaaccagcctgatctggtcccaacaacatcatctggaattaggccagcctctggaaatcatttggtaaaagacatataggaactcaacatttatatttctttaatttttctgtttcatcccactccattgtcaagtgtgcccccatgagaagtgaacacgattggtagaaaccttgattacttaatggaagtcagcaggaagggattcaaaacctcacttaactttatcaggatatattttaattttacttatggtaggcctttgagttgatcttccatgttttagaactctgataggcatttggatgtggctgaaaaatattgagacttattaaatggaaccactggattggactttgaagggccagtgaaattttaaatgcagtatcattagagtagacgtgtgtgcatgtgtttattaggtaatagataatgaaagtaatacttaacatttactttttttttccacgtgccaagccctatttaataggcatcatctgttttaatccttacaattccatgaatagcctcattatacagataaagaaaataaggcttaggcagcttagggaaatttgactgaggtcccacagttgttggctatattcaatgccagagcccatatgcttatagaacagggagttcccatgtactgtatttccaataatctgcaacctttgaggatcaaccgagattgagaaatcaggatagtaaggctgtagaccaaccactttgcaagaatgtgtcctctgggggaatatccctgaatatttttgacactagaatggtgttcacataactttcctcaattctatgattgtgaagatcatataatttctattttaaagattgcaatttgtcctggagagtcaagattattctctgggtacagctttagtttatccatgccttgcaattttaaacatgatgactctctctgttcccagaaattgtggctctgacaagctcctgctgcagtcacttcattaatcttactctaccagggcacctgttcactattgtgcggtgtcggctgatatcatatggtaattatgttgttaattcatgggctgatgttttccaggctgaagcatggcttcttacaggtagtgatctgggcaatcaaactgagcagacaagaaaaacactgacaattgtctgcttctactagcttggttgtatgacatgactctgggtggaacaatggccatttgttgaatatggtctttttcatggggctgctactcagcagaaagtcccttagttaagtggtgatataaagcacaaactcttgagcaagattcaacttgacctgaatcctagctccactccttacttttagatcttaaagttacttaacctctcactgtccttatttacatgatgggaataataaaaaagccagtatctgatgcaaactattagcccaataaacacacaataaatgttcatttctattattgttatttggcaaatatgtattgatgcctaacttttacttagcaacatgaaaaagcttcttagagaaaatggtactctagttcagctttccataaataagaccaaataaataggttgagataagatagaaggatgttacagatggcagcttgtgtggtctgttgtggcttgggttgttgaacgctgagaatctgcaatgagatttttgcctttcagtctcatgtgatataatttctgaaggacttagactacaattttggctttactacttcttagcagggtgacttgggcaagttacttgactacttcgtttcttccaaaagtgcaggtaataatggtacctacttcataaggtctctcctaggattaaataagtaaagcctatcaaacacctaaaccagtgtctggtccatggtaaatgttcaggagcaattagctattgtttataatattattacttatggaggttatagtttcactggggaggcagacttagcacatgaaataataagtgacctatgattcattgtcacatgtataacatgtagtcaaagacagtagtttttaaccatttcaccaataagaacctccttatcattccctcttccagtgactctgttaaaaaaatcacgcaaaacagcaccacagaaacttttgttttcttattataaaagcagtgaatggacattgtagacaaattataaaatatagatgaacaaggtgtggtggtgaaaccagaactataatcacatttctcagagataacaattgctaacaccttgatatgttagcttttcatatctttgtgtgcacatatatatatttttaaaaaatagaattatactattcatactatttttgtacttagtaaattatgagtatttgtatctattaataaatatttatcagccatttattaatgattaaatactattccattgatgaatgcactgtcattctttcaagcagtctgtaccgtggcatgtgtaaggtcttccatttttgggcatgtgtgccatggtgaacagcgctaggatgagactgccttatgcctacatgaccatggatgcctgggtaaagaggatgatcatgggtctgtatcttggaggtaagggcctaggcaggcctgttgtccacttctggagcaggagaggacacaggcaaggcagtcccaagtggtgaatccaagactggaggggagacagagtataaaatgtgatttatgagagcatagccaaggtaagccaaaaagggcctgtaggtcctgtggatgaagaccagaaagagcctccagttagcaggagaggccttttctggaacaccagtcccctaagcctctctttaatcgtgattctatgaatttctgccctacgaggtcagagaagggccaacagctccatgagatggggtagttagaaaacctccctgaagcagatgttttgggtaataagtaaaaatgaataggcagagatacaatggaagcatgcttcagaaggaagaattgcaggtctagtgtggtgtggcttggaacctgtgagttctgagaaggtggcagtgcagttgcaggcttgtattcacactggggagcctctggtagctgcccatgagtttctgtgcaaagaaccatgactcatctttgttggcagaaaagtggggaagaaaaacaaaccaatgaacattagtcgatatcctggcttaaaaaaaatctattaaaaaatcaccatatccaaattagcttaatctcccaaaaactgtatttaatataaccatacatgaaagtaaataaactgaaataggctgggtgctgtggctcacacctgtaatcctagcactttgggaggctgaggcgggcggatcgcctgaggtcaggagttccacaccagcctgaccaatatggtgaaacccgtctctactcaagagtacaaaaattagcccggtacggtggcgtgcacctgtagtcccagccactcaggaggctgaggcaggagaattgcttgaacccaggagggggaggttgcagtgagccaaaatcatgccactgcactccagcctgggctacaaagcgagactccatctcaaaaaacaaaataaataaataaataaaaataaactgaaatatcttggaccactgtgtcagaattatgccagcagctctcctgtctgttacctggctggtagctgagcagaaagcatcatcttcttctttaaagcctactgcttatgcccagaagaaaacttctagttttccctaacatattgcctattgttaggttgtttcctttctttcctgctatggtaaacagtgctacgatgagactatggtattccagctcagttattttaaatattttatctaatggaattttactgtatttttgccctggagacttgcagcagtgggcagaaccatgcagggctaactgataaataataaatgtgataatgcccattaatctgtatttggaagcagtgtttcctctgctcttttcaggttttgacatttacttgtactgtttgccctgtatgtggaggtttatatagttacactttccatggaaacatcttctttaaatttccagaacctgtaacatatatttttctctactattaacccagtagggaagaatgttcatattagaatgaggtcaagcttgttttctgtaatttgccatgaaactctgagaaacccagtgttcttatctgcacccccttatttctgctgttccccttcccagccaccagcagagtgacctttctttgtttatatctctgacctgctcagtttccatggtggtgtggagcattgtgactgttttagagataaatggcttttcactggcttttccaatgacatttttacatggtgagcttttatagcctgtaatatactatagagaaaaatgacaagaggcagcacaattttgcttgatcttggccctgagcaggctgtgaggcagggatgggaccagtcctacaaacaccagagtccttgctctctgattttgtgtcagagttttaatccattaactttattcagcagaattcactaaccagcattgtacatgccttccagggaccatgcacaggcacttgataactgtttggtaaatttgaacttaggcaaaatttgcaactacttattataatgtgttaagaaaattgattatatttctccatatcaaaaaaggcattcactgacaactttgagatgcagttatgatcctttacccctactgcatcatggcctgctggggtgcaatcctcatccatcctttggcagtagaaagaccctgtgagtaacacagtccatgaagggtggatgcctgaatggtgcagccctgggcacatgtgagcatggtacgatggccacccttcagtgtgctgtgagagagcatgctgccagagagccttggaatccatttcagacatttagagggcttgatgcatcctcttacctgcggggagttccagttggccattggagctgctcctgtagtgcccaggaggtgagagagcacagagtggtggaaagagtgaaggagcagctttcagtgcctcattacactccttggcagctttgtagcttgggtaaatctcaacgtatctctgagcctaacagtccacttccatattattttaacgggcctacttgtgtacctaccttccaggttattgtcaggttccattaaataaactcctctggttcttcacaactctctccaacttcactgcctatgcctggaagaagaggtgtttggaagtatttgatgatagaatgaaaagtattgcacagataattttggtcaaaccttttcaattttggagcagatggggtctcattcacttcctgctcattggagggtagtgcaaatgcctcaattgcttaattgagggaacagccaactgtggtttgatgtcatgatacattctattgtgccagtcatcaaacccacatttccttggggcccaaaataggaatccggttgttgtaggacatgtatttttgcattgtttcaaatgctagttgatctttaactttgcatgccttatatacattcctggagctctttcaaagtataatattaagcaagagaagctatggtttgtgtatggcacaaaaaaaaaataagaaaaaagaaaatgttttcctttgttttgtctttggcccagggtttattgctgccagggacctatttattagccagctttaaaaagcagctgttctctgtcttcttttttcctccaatgatgcctgccttggatatttgggcatggcttaatgttaggcgatgctctgtaaagcgagttctgggaaatggatttcatacctctttcagagggtagagaaattgaagcataaatattgaatccacgtattaaagagaaggtagataattaagctcttgtctggtccctggcagcttgttgatgtgtttttattttctagtgaatgagtgatattcttcaaagagaggtgccatctgggaaatcaggtctctgctgaagcatagccatgatccctgcattgccatgttctgcacaggtccagctctaacccacaggcgaacggcagggctggactaattacgcagctgtcagaatcacacaaatgaatggactgggagttctgcttccttgtctgtgacagtgtgtattggtttggatttcacttttctaacagtggtattttaacaggcaagagagcatttgtatgaaattgaaaactttctaaaaacagtattaagaagtgtatctgtgcatgcttgcagcccagtgatacagagcttgctaccagcacaaagccaccattgcttgtaagacaaatagatgaaatttagcatcccactgcaagagagtgactttcataccctgcagaaacatactcacatgcacaacacatgcacctagtacctctactcattagatatatgttatggacattgtatagctgaagtataattatgttgtagatatgtaacaggaagctttttgatatagaatgtttctccttgaataggggaggcaactccctctcctgaatgaaccatcaccactgcactacagacatgttgtgaaatcatccagaaaccaaatagaagatcccctttttttctgttctgagctatgtgaaccaggaaaatgtgtgaagggccatgccatgcctagccatattggagtccatggctaaaggaaaaatcactaatactgactttgtctttatacaaaattttgatatttggtttatcatgggttgcattaattttgatttttaaaaaagtttgcattaagatattacttaataggttggaactctttgggcaaccacttaaactttatatccctagtcccagccctgttgagggtccctttgcatttctctgtggatgagaggagagagataagggcttcccatgctttttctgctgcctatcacactctcccctcctccctaccatatctggttatgggatagcaactgaatcaggcatagccttcattcatgaagttaatggtctggaagtaatgatagacaaaatcagattaaacacatttataaatatcagagtaaatacatttataaaaattagagttaacacatttataaatacattttttacaaagggagatggaaaaaaatgaacatcataatgttgaaaacaagggtgggtatggtgatgaagaatcttacttgagcagttagaacagacacacagatgagctgacatttaagttcacacctgatgaaaagaaaccacaagacaaggtgtcgggagagacctccaagtagaggacactgtgtgaagacctaaagttaaaaacagattggctggtgtcagcaagtgtgttaagtaaggcaggaggtgaggcacagggaagagggccagagtcagaggcagggaccagatgacatacagtccttgaaggttaatgttagatgttcaaataggggaatgacggtgtttagaagacatctctgagaaacttcctctcaccctcgcctcgacttgctgtacccacagcagcctctatcatggtacttattgcagtgtagcaaatgctttgttatatgtttgaaggtactcccacccttgatactgcagatagcagtctgctgaaaaagagctttggagatcaggaaagctcttcgcagtatccattgggagtcttaggatcagaatctcgtactctgaatgcatgaatatttttttgtggtatacattttcttcagttacttctctgtctccttaaagaaaatactgcctcatctcagctttaaggaattattattttgctttttgaggttgtttttatttttattttttctttctaatttttattttaggttcagggagtacatgtgcaagtttgtcttatgaataaattgcatgtcatgggggtttgatgtacagattatttcatcatccagggagtaagcatagtatctgataggtagtttttccatcctcactctcctcccaccctccacccttgagtatgtcctggtatctatcgttcccttctctgtgtccatgtgtactcgctgttttgctcccacttctaagtgagaacatgtggtatttggttttctgttcctgcgttaatttgcttaggataatggcctccagcaagctttaaagaaattttatctaaagttttaaggagaatccagtatcctgctgtttcaagaatcacaaaggaaggtaaaaccaaagtgagaaaatagtaaaggaaagagtggaagaccacctagagaacttcttccaaagcagagactcctttgtttcttattatctgctaaaaaccataggatgttttaggccttgttttaccaagatttatttctttgctcatgccgaagaatttcaatatctaatttattaattagctttccatttcaacaacttgttcagtgacagattttcctttgttgatgtgttttaggaattgaaattcctacaatatataagaggttaataaaaaagtgtttgtcttattccctggccaatagaacttccagtacttcttgttctcatctgtctcagagagaaatctcactttcctgcagtcaactctgttgcccattggcattttttaagtcctttatcctctccttctgcaaacacacattagtgtctgctgcatgtgacttggcaattgtgcaaagaaacaagatgcacaagccccatgctcagcgtggagcagcctgcttcttgatggtttatggggtgacagcatcatttgatgtgctttggaagcatgctagagtgagaagtttattttgctttgctattaccttcacagaggagcaaatatttataaccagactcaaaagatgtctaataatgtgtggtattgaccaatttatatcatgttccttgactataattgctggcatgctctcattttgtatcagtcttgtctgaacaagtgagaggcagatattctttagcaaattattgaatcgttagtgtgtttcttggagataatgtaacatagtgtttagaattgctggttctggaacaagactacctgtctacaaattccaggtctgccagctgacagcgtctgtaaccctgggaaacatcctgaaaccctccaaagttcatatttcttacctgtaaaatggggttgaatactactagaatctacctcatacagtttctgtgaaaataaatgaaataatccttgtaaagcactatttagcatagtgactagcaactaacaaacatccaatcaatggtacctatttttattggcatcagaattgacttggggagtttattaaaaacactggcccttgggtcccactgagactcactggatcagctgttcaaggtaatttttggaatctgtatttctaacaagcactccaggttatttacactggtagtctggcactcatatcttactggggcttgtcaactacagaacttcaaagggtaaatgcctggacattagttagaaaagcctgagcttgaattgcagttctccgacccctttctgtcggtgtgacattggatgttttacctatttttcctgaccttctgtttcttaacttctaaaataggggtgatgtttttctaggtttgtgatgaaaccacgtgaatgtggtaaaataataaatgttggatactaagcacctagcacatggttaagggctttataaagcatggcttctggtctcacgagtgtgtgccagccatggtgtcagatgctggggatccaaagacaatagacaccttgaggtttgcagccagaagtgtaaaggatgagtgttttaatcaagaataacacctaatggttgggagggtccctaaaaatcacctagtccaaactggtggagggattgtcctttaacattccccacaagtggtgatcttctaaatggcacacaactctgtcacaagttagagcaaaccacagtgtgcctccttgtgtattctaattgttggtcctggcatgtaggtccctctgggggcccacagagtaagtttcatccttggatgcagttaccatcttcaaatatctgaaggcagatgtcatatttcccctgcctttaatttttcaaatcactatctccgattacttaaagtgtttctcatatagggtaatttggggcttccccagacccacattctgctcccattagcagggttttcttcagcctgagggaagctcagggaacaactgtcgtggcatggatgcctcagcagaagggcatatagggccccttaaatggtctgcatgggaacagcataggaaataatgctgttgcatgtgataatcgtacattaactagttatgccaaagtgggtggatttgataactgtggaagaacattggaaggataagtcggaaaaataagggcttcttagaatgtacctagaatatcctgagctttcatttaagcccagtgtctgtttgaaagttattcttttggaatgtttaagtatttctagcacattaagcttatctggctttgctgtgcttataacaaataaaaacgttctgggacctgtttgagaggaccatgccatttaaactctgtgagctaatgagaaggccaaagcatacatttgataagctttgtcatctttttgtctgcagatcatagaccttgcattttaatttactatacataatgctttcttaatgagttccagtggatggccattgaaacatgctggagcagctgccgacgtgattatgggggagaaaaagcatttatttgatttacgtgatatgcagttagggtaactaatatttgcagccggggtacaataatggcaaggaaaaaaatttgcagtattactgtggacaggagaaaggtgctgaatcaatttatttttcccgtacatgtgaaaactactaattgaaagctaatggaattgcattttaaatgttgagtatcttgctagacattggttagcattgtgccagaaagttcatattaagccaatgcaattatcagaattattttttaagtgaaaattgaattgagtttccagggactgattttggctatgttataaaacattgcccttcacaatggttgaactagtttacagtcccaccaacagtgtaaaagtgttcctgtttctccacatcctctccagcacctgttgtttcctgacttttaatgatcgccattctaactggtgtgagatggtatctcattgtggttttgatttgcatttctctgatggccagtgatgatgagcattttttcatgtgtgaaaccatcattctgagcaaactgccacaaggacagaaaaccaaacaccgcatgttctcactcataggtgggaattgaacaatgagaacacttggacacagggtggggaacatcacacatcagggcctgtcatggggtggggggcaggcagagggatagcattcggagaaatacctgatgtaaatgatgagttaatgggtgcagcacaccaacatggcacatgtatacatatgtaacaaacctgcacgttgtaaaacttaaagtataataaaaaaaaatgcctttaaaagttaattgtggattggtgaaacagggaaaaaaaaagattggagataattcctaagagtaaaacatcaacaaagtcacagatgtaattaccatagtcataaatagtagcatttagtattaataagtgttgaaaagcactttcatgtacatcacctgatttcattatcttaattctatacagcaggtactattgtcctaccttccagatggggaaatggaggctttaaaagcttaattatgtatccaaggtaggaatgataggaagaatggtaggaatgatcaaatatgatgtgagctctgactctttgactctaaattttatttctagggataatatctgttctaataccttcaaacatttttgtctccaaatatatattatgaaagtattagttaaattgtaaattactatctgtatggatgtatgggatgattattactattaacaatctcaaatagttaaaccaggaagtggaaacggaaaatggaaaacaagcaatcaaagacccaaaattgaagggtgtacttaaaaagacaaaaatggcttttagatattgagttattagagttttatgtcttgttttcgaagccatgcttcaaatctatcacttatgcactcagcatccccattgtctctgtccactcgcctggccaggtagccaaaactttgcctccattccgcatatcttttttttttaaattttttaattattttattttattattattatactttaagttttagggtacatgtacacaatgtgcaggttaattacatatgtatacatgtgccatgctggtgtgctgcacccattaactcgtcatttagcattaggtgtatctcctaatgctatccctcccccctccccccaccccacaacagtccccagagtgtgatgttccgcttcctgtgtccatgtgttctcattgttcaattcccacctatgagtgagaacatgcggtgtttggttttttgtctttgctatagtttactgagaatgatgatttccaatttcatccatgtccctacaaaggacatgaactcatcattttgtatggctgcatagtattccatggtgtatatgtgccacattttcttaatccagtctatcattgttggacatttggcttggttccaagtctttgctattgtgaatagtgccgcaataaacacgtgtgcatgtgtctttatagcagcatgatttatagtcttttgggtatatacccagtaatgggatggctgggtcaaatggtatttctagttctagatccctgaggaatctccacactgacttccacaatggttgaactagtttacagtcccaccaacagtgtaaaagtgttcctatttctccacatcctctccagcacctgttgtttcctgactttttaatgattgccattctaactggtgtgagatggtatctcgttgttttgatttgcatttctctgatggacagtgatggtgagcattttttcatgtgttttttggctgcataaatatcttttgacatatttagtaattctcctcttttgtgaacacacaaacacacactggggactctacttattatcttgcctttttttgttagcccttcttcagtccctactttgtgtaaagacagaaacccgtgattagcccacttgtcagtactcaaatgcccttatccttgggcctatacataatttaaatagttttatcatgtctgcatatgtccagggcttattactcacaattttgtttcttggtgttggtctgtcatgcatccccagtcccttaaagctgtgcctgtgccacctgctctgtatagcacccagaacaaaccacttacttgatgatgggtgttgctgagggctgagcttatgccatgttcttctaatatggaggcaatagcatttctgtttttgaacattttttctgaagtgccattgtttctccaatcctaggactgcagcattaacttccttcttctatcctgtaagaagaaagtaaaatacaaatattaacacaggtccatagccctatatcaaaaccactggggtcagatgtattttggaattcagaattttagaaaggcaattgggagtgagcatatgacataggagaagtcacatatataacatatgcatgacattctctgtagagcctagggcagtgccttgtaatcaaatactttaagatgtcagcggcaaaacatatggagagtcacaccagtgggctgagtacaatagcctcactttgggccaggtcgggtttaatcattacatggtttctgattagatcaggttttgcagttaaatgagttttcagagcttttgagattttagaattgtggatagagcatggattgtagccctgtaataacagaaaaatcactttatgaagtaactcccctgccatgcatcttgttataagaatttgagattccattctcttagacaaaaggacacattttcatataataaaatgcatcaaattggaatatggttggcctaacatagtgcttaataaacttgatggaagaagcctttgaaagctcccttgtcatatataaccttttgtatagcatctttaatgcactggcttttagtatattttaaagccaggtgtagtgtaattcttcttttttcttcagagaaactgtggtaggatcagtgcaaagccaagcaatgtttggagggtgtattagtccattctcatgctattaataaagacatacccaagactgggtgatttataaaggagagaggtttaactgactcacagttcaacatggctggggaggcctcaggaaacttacagtcatggtggaagaagaagcaaacatgtccttcttcatctggcagcagcaaggagaagtgcagagtgaaggggtggggaaactcccttatataaccatgagatctcttgagaactcactcactatcatgagaacaccatggaggtaagcgcccccatgatgggaactacagttgaagatgagatttgggtggggacacagccatatcatatcagagggtgtggataattttagaagccctgtgccaatctctataaattattatgattttttgctaatgatttctttttcttggatgtgaagccatagccaaactttcaaggtgtcttgtcatctcaaagtcattttcaaatgtattctgaattttgagccaaatcataatttctcagcatgggttcattgtctgtgagggtcataacttaacgaaccatagggctgatcaaggtcattgtatatgttactgatgattaaaaaataaaaggcaggcatgtgggatcttgattgtttcattcaaaaacccaaaattgttcaggaactcataaattagccctgtttaatgtttatgaagacaattagggaaagattgcttcaaagtaataactgttataaaaatgagacctttttaaaaccctgatttataaagcacttatttgccttcaagaattttgggggctgatttataagctgattcgccatctgtctcttcttggcaaaacaaaggagaaatggttagatactattttcacagctacattaagatattaattgtgtattttacatgagaaagaaatagagctaggattggcctcatccttcttttaaagcttattttaaaatgttctaatttgtgattttttttttttgagatggaatctcaccctgtcacccaggctggagtgcagtggtgcgatctcggctcactgcaacctcagtctcctgggttcaaatgattctcgtgcctcagcctcccgagtagctgggattacaggcacctgccaccatgcctagctaatttttttttatttttagtagagatggggtttcatcatgttggtcaggctggtctcaaactcctgacctcatgatctgcccacctcagcctcccaaagtgctgggattacaggcatgagccaccgcacctggcctaatttgtgattattaaagataaaaaatatacactaaacagaaaaagtaaagcttgaagccaaataaattgtgttcctattagacttttaatcaagactttagagttttgtttcatttacatgttgtaacagttaaatatctggaacatattatccaatcatgctccaattccaagtgcagaaggaacactatattcccatgattaatattttcatgtcacatatagtatttattttcattatctctaacggtccagtggtcatgccacactgatactgtgtgattatctccattctcatgagaaagaatttgagccctgagagatttattgcccgaggcagaacccagacctctcttactctgaaggaaattctctcttccatacttgaccttgattctttcaaaattttggataattataagcaaacgtttcataaactaaagacaattattctagtggactaggccatcagactttggggtcaaggtgtttttgaatctgttttctcattctgagttggatgtcttccaccatcagttatataatgtatactttttattttgtaactcttacatccagtttcagctatattttctatttagatctggcttaaatcttcttaaacctgtcttgaaatgtaaatatgaacatagaaaccatatccccattccatgactggggtacaaattgcctttcccatctcttgtctgttgatcttaattgtctcatctgtctttcttagattgtaagtcctttgggaaacaccaagccctgctgtacatggaactcacagaacttcttgggttattatttttcattaggttagacagcagtgatccaagggtgatcattttctgtgggtttggctgaaatgcctggctttggaaacccaagtcctgcacacatgtacacactggtcctatttgtagctttcagtgctacttgtaatctggtacttttcaaaattctgtctcttagatgcattttatcctgatagtccaattcttaaagagtcatcccattatttttatatgacgactttaaaaaaattatttcatatccttcatagaaattttagaaaaaataagaataaaaggaaggaaacatacttgtaatcccataaactagcaatagctacatttagtatcatatttttccttgagaattttttgcaacctgcttttttcatttgatatatttttaacattcttctgtaacattagttttaatgtctgcgtagcagtctatttgatagatatgtccatccctttgtgttggagaatttcatatatttactttttatgactattatttaagatcagtgcttttaatattttcctattataagcaatgctttgataagtatccgaagcctaaatcttttagcacacttttattacttccttagtttaagttaaatgaagtgtaattattggggcaaagggtgagagcatctttaagggtcttaatacatagcactaatttgtttcctataaaaactcttaacaaaatattagtgttaacatataaaaaagaaatcctacaataaagcaaatagcttaacagaaaaatggcaaatgtcttaactaagcattttacggaagagtaaaccaaaatgatcagtaaacatgaaaagatgctcaccttcatgtaatcagggagacaaattaaaatgacaagagccatttgatacccttcacgttggcaaaaattaaatttggctataaataaatggttttgaggctgtgaagcaatagaaactcatacatagatggggatggtgtaaattgtttcagcaactttggaggacaacttagccatatgcaaaggacagttgaaaatgcatttacgctaatcagtatccaagaaaactcatctacaaatgcaggaaagtttattctagcattccttctaatggcaggaaactgggaacaacttaaaagtccatctctgaaaatatagtgtgatacattcatgcagttgaatattatacatctgtgaaatgaataaaccagagctacatttagtagcataaataaatctcaaaaaacatattattgaaaggtaaaagtcttcaaaagaccctacttttcatatgctatatatatatatatatatatatatatatatatatatatattctgtaagttacatacataatttatgtatgtatatttatgtatgtaatttatagactatttttaaaatgcaaaagattattaggtattattttgggagttcacatggaataaacatatcaaaaagtgtgcataacagtgagaaatatagtgacactgtgtggagcagctttacaagagtttctgttatatctgagttttaactcttaagctaaatgagcagtgtgtgggtgtatattttttctctactcttttgaatgttctgaaatgctatatttaataacaatcatatgaacaacttttacttttagcagtactgtaagtggctatcagttccccataccctgaccaacactgactgccccacttctgatggctctttggtaacctggtttctgcagctttattttgaatatttttttctaccagtcatcataggtttgacctggtggactgatcaacactctctagtttagtctgtcttgtgacaaccagcaagcattttgagaatacagacaagagataagggtatatactgaggcattgggacgtagtatttgcagtcaaaaagaaaaataaaactgcctagctctgtggacaccaaagatgtttccagctaagataataattcaagtcgacacatgtttttgactgtcttgtgtatatagcatacagtaccatgagctctaagtacaatggaatattctacataaaaactgaactactaacaccctctccatgtctgaattcacttgtcagtgtaaacacgacatagctgtcatggcctccagagtgcccaccaccctgctttgcttcccctttatccagcttattagtatcctgcgattaaacccttctggagacagtaggcaatgttcagcacttagcttggcagaagaggccttttatgatctaagccccctctgcccccttgcccaggaaccactcttataggccagtttttggttctaagaaggctgcttgctcttcgtttatctgtgacttccagtttgttcctccacatttttggaattttcttctgccctgtatctgctttgcaaacctgcttatcctttaagctttagcttaaatgtaaacttctgggaaaagtctccactgagctgcagcctcccgtatgctcctgtgcctctgtacatatcactatctacacatggcagccttcacttgtgactctgggttcacgtatctatctctctaattaggcttataagtttcttagagtcagaaactatgttcttcatgtttgtatacttaattggcgcagtacttaccatagagcaggcactcagtaaatgtttgttaatttaattggaattagcagtgttctcacttgtgtgtgtgtgttgggtggggttgtgcagagagagatgaagggatagagatatcaaatccatcagccaccatcttattatattttcacaccttctatctgtctttagcatttcatcttttttctttgagacccttttttagttgattacaattattttgaaattttatcatcattgagagtatttggaacatcacctcatttaacttcacctgcaaatgtagtaagtacatccttgattatctcatcttaaggcgtcaatacagactgaaatagattggattttaggacatattcctgtgtgaatgtttgataaatctctcccaatgtttgtgagacatttgctttctctgcttttggacttaagttaaataccaactcttaaagccagggtcccaatcaccatgtacagaagaggactttggtcagcaaaccctctcacagagaaaaagaccttgtgtacacagggactagcaagaaactcagaatgcttttatttttcacatagttaaatgaagatactattcctacactgctagcccagaatgattttggcacttcatgggccttatgtgtggaaagatgactaaagtgacctcctccggcattcctaagatctgctgtcactcaaggctctttgtcaggacacgtctgctgccagccttcctatggagctgagaattacaaacaccacatagatgccttgtcattaggtaatgtcaaatccaactggagaacgtaacttttgattgtcagaagataaaggagcagcctgatcttcctttgagaggaaagagattcccttgcactgctccaacagcttcttataaaccctgtgctgaggctcactcctctggtggttcccatttcagatgcagtgccattttgcttaatggcagctcctagaccagctaataagaaagagtaatccatctgctaatgaagagtggttgtgccaaggacatatttcttcatgagaaatttattaccaggagtatatacattagaggtgatatacaaatatgttgcctggcctgaaaagagtacatatgaaatacaaagggtaatgatgaactcctataaaaagcctcaagccactgcacctaaaataattctgggcttgggagtggtaggaagggcacagactctaccttaactggttgtaattcatgtatcaaatgtgttcagtgtgctgggcatacaggaaggggaaggggatggatgtcattccagccctcaagatgctcagggtgcagtgtaggtgtcaaaaggccttagacaagggaccacagggagatgaggatctcaatgagaacaggagactccaggagctcagagcctggggtgactaatggaaccagggtcctgggaaagctccctggagatggaaatcagaaactagaaggtggagtgggagttaccaagtaaagaggtgaagggaagagtgtttctttggatttaggtaatgccaggggtataggctgatgtcacgttactcccaggccagtgataaaagagaattaagaaggtggacagtggggaaaatactagagatggctaaaaatgtgcttggctatctttctaatctcttttccttcctgattgtattcatggcttgttctatttagaaaaatgcaagcaataatggctttctgatgatctgcacctggcaggcctcatgggcacattgcccttcccacatgcccactggttttaaatatttctcctttcttcgtacccaccttgacacaatggcggttttggtcttatcatcctgggtcttgattaaaggctatttttgcatatgtgtgcctctttttccgtctttttcatgggaaggtctttgagggtggggattgtgtctcctctagtttctagggtaactgtcttctttagttctcttgtctgggaaattctgggattctctgcatctttttaaaaaatccttatgctgtttttaatgatctcttccaagacatgtttcttatctcctggcagagaacttcatccacataccagtaatgatctgctgaccattttgtttgggctgtctatttttttgtccttgggtcactgatgaacaatagatgtggatatactctaggatgctaccctggctttttttcattgtgggatcctagggtcagagggaaggtgaaacagttcaaaagaacctacatatgctgtgaaaagctggctgtggtttcatggcccccacagagacaaagccttgaaactctcactcttatgtatggaaggcttcagtttctaacattagaaactactgacattctttgttagttcttcagcaattacttgtttaccagaggaagactggaaaaaaaagaaatgcaaaataacaaaaagcaaagaaccaaacaaaaaatttcagctgattgaggaatatttgagaatattccaaatttttaaaaagttttaattatcattggttcacatatttatgagtatgaatttggagtgtgatattttaaatctaaagttatagactagaatcatgatcaaatataaatttaaatttatttgtagggagtcacttccatacaaatcctcataaaaaggctttatggagagagcaggtcataaaatcaagtgaaaaggaagaaattaaagaccgaaggttaatgtggagcaaaggaagaaggtttagtgatttatgagacagctcaagtgagagatcacctccctttcaaggttcacatgtctaatggagacactgggctggccagcagtgagtgtgtgagtgtgtgtgtgtgtgcgtgtgtgtgtgtatacaagtgtgtgcaggggaagggagagagtgtcagggctgggtgggtggacagtaaagaggtctaccaaatactgagaaaatgacttgggatacgcatatcaagaaagcatcctttaacttattttggatttggctagatcaccatctttttgttgaagccacctgaaagcaattgaccagatggaaatgtcagactgacaataatatctattatttgtataacctagtttcaaaaccatttatataagccatctaagtacatttgggttgtaaggaaaattacagcaagtcaggtttgcttctgcccatcctaggttactatctcttatcttggaggcagaaagagagtttagaatttccttggtcttatcagcagaccagtacacacaccaccaccttgtacacatacacatgcagaaagcacaaaatgaggcaataacatgagatgctgcagaaagcagagagcaaatgaatacagccgtacttgggggtgaatggaagacacataaatgcattgactcttatcaaaacctaataaatgggctgtgtgaaaagtcctgatctctgcaagaacaaaaagctttataaacgaagacactcagagtgcttggggaaagaaatcaacatggagagaaaagggagcctcacatttacttaaatgcagtgggtactatgaatactctgtattagaggatcaagttgaagacagtggtactgaggaactaaaaattaaccacattttttctggaaaattacaagaagttgcccatatcaggtatatttcctgtgactttctcctctacttgcatatttgttcttccaccatgaccaccacgtgaagctttgatttgtgtagacagttgtttaattccgtccagactgccagaagccaatggtggtaatggaaaacataaatagtgtcttttaattgtgttggaaattcctccatatgctaccttttagcttctgaatacctgatggtaagttcgttaatgaactttagtagtgaatccaacgggaccataaatggtcttttgtttattatttttaattgagactgtctgacagctttatttaaaatactttcccacagaaaagaatggagatttctatggtaatgtgagactgcttgttttatagaacagatgacaatgtagatttcactattttggagtttctggtgtgaagtgtatttttgtccacggcctcctgctttgtgtaggtggcaaacagggcattttaaaaatacaaactgtcagacttctaatttagggaatcaagtaataggtacaaaatgatatatgcaatctaaacacaaaaattgaatatgtctttcctttctttttggataattattgtttctgtccttttataagtacttgttcttataggcatgtctttaaatgttctccagtgttctttctctgaccttatctattatctcactggaatcaactgctcactcacattttatgtctacatctattctagcacctaatgtttgctagtgtacttatttattttactgtctgtgttctggcttgagtgtgagcttctcaaagacagaaaatgtgttatttctttttatagctcttatacttaacaacagctggtacctgaccctagagcaggtgccgagtaaatatctaaggttgaatgtattcaaggttcactgattttttctatgtctgtattagaacacaagaccagttagacagctcaggctatgcaagtcataatcagacttgaccttgcttaacttacacaagagtgtgctgcaggagttctgtcaacatggcagcatggcacggggctaggaaactgtgtgcatgttagaagtcagtaatactgtcccaggtgatagccttcagtgtagaagccagaaggccttgtatacctgtgagcaagctagagaggcatattactttcctgacgtgtccttggggaaaagattccagcatagagaagttatttaagacagctagctataggttaaacactggctatgtgaggccaggcaaatattttccaaataaaatgttttcctaggccttgaaaacacagtttcaaagatcaagatatttatttcaaagaaactgtcttcagctggtaaccgaattcatcaccttgcccctcttgtaagccagttttgctcttgaatttaatcttactacggatgacaacatcattttcccagtcacccagacttaacatattagagtcattttgttccctttttgtaaaacttcctcctggactttgaaattctgtaggtttaacttcaacatgaagcttggtgtccatctctttcttccagttttaccatcactgcccttcagctcatttggccttggcgactaccaattattgcttccaacgagttcctcactcaggagatgatatagggtcttctaagactctcaaaggacttgggcattgtcctcatatattaacaattttatttccccaaacaacctgacaacctcctgagataaacagaaacgatgcactttctatctgatacatttttttttttctgagacagagtctcgctctgtccccgaggctagagtgcagtggcgtgatctacgctcactgccacctctgcctcctgggttcaagtgattctcctgcctcagcctcctgagtagctgggattataggttcccaccaccacacttggctactaaaaattttttgtatttttagtagagatggggtttcaccatgttggccaggctggtcttgaactcaagtgatccacccaccttggcctcccaaagtgcagggactacaggcatgagctactgcgcctggctggctttctttctttccttctctttctttctttctttcttttcttttcttttcttttcttttcttttcttttcttttctttgttgttgttttttgtttttttttagagacagggtcttgcacttttgcccaggctggagtgcagcggggttatcttggttcattgcaacctctgcctcccaggctcaaacaatccacccatctcagcctctctagtagctgagaacacaggtgtgtatcaccacggccagctattttttttttttttgtatttttttgtagcgacaggatttttccatgttgttcaggctggtctcgaactcctgggcccaagcatcctgccctcctcagcctcccaaagtgctgggattacaggtatgagccactgcacccagacttaaacattttttaattgactgaaatacaactaaaatgttcagtgacttgcctaaggtcatgggccaaatacagcgactccaaagttttaaaatgcttccattttcacaacatttattcaatgactcatttagcaagtatttgtaagtatttactatgtgcctagggtgtaggaactaaaattaaggctcaatattacgtgctgccttaaaatctgataaaatcatgcaggccttgaatggcctaaatacaagctgtccttcccattctgcctctgtagataaggtcccttggtcaaacactcttctttatcaaagggactaagtaaaatttctgcttattcctcattagtatgcttcagttccctgccctcctgcaaaattattcaaacaagccaatcacattgtctcatgagaaccaggggacactctaccctcttggaactacaaagctggcctttcatagtagttatttgctttactcccaagtgtaactcctatatggccctgtgtggtatccttctcccctggactttgtgtatacatgactaataaactgctgtccatctcgtctatccagtgtgggtgtcatgtggtcagccaaccctacagtgctacggtgggaatccctccctcaccaacagggtgaataagaagcaattaaaacagtgccaaggctgggcgcggttgctctcacctgtaatcccagcactttgggaggctgaggcaggcggatcacaaggtcagaagatcgagaccatcctggctaacacggtgaaaccccatctctactaaaaatacaaaaaattagccgggcgtggtggcgggcgcctgtagtcccagctactcaggaggctgaggcaggagaatggcatgaacccaagaggcagagcttaccgcgagccgagatggcaccactgcactccagcctgggcgacagagtgagactctgtctcaaaaaacaaaacaaaacaaaacagtgccaagcatgcaaactttaaattggagtaagttcaaagacagtatattttggagtcaaaggcagtatattttggagtcggccacctctgtgtacctcaaattatggaagaaacatataccagagcttttacccatgaattaaggaaagcattggcatcaaggttctcccagtaccacaactgcattggtgagtttttttctggaatgcaactcatagggtgaaaggcaagaggaacagctgactttgtgttccactaccctagtgagcttacatgaaacaaatcttctagttctctctgacattagtagcaaaatgtaatatgtccattctcagcagcattctatgatgcatgtggcttttcctgggagatcagagaggctccagggttatgaaagtggaagcaatgcacattttttttgtgtgactgtaagtgaacatcagtgcttagttataagcattggggagttgtccagttgctgattttggctttagtggaatacttccattggatgctgcatgaccagaaatgtctaaatgaatcaatcgtatggagtgaagttatgatttcatgaatgggacagtaagagaagatacctaagggggtgcccagcaaacgtttgttgtgtgagtgaagctttagctgaggaaaactactaatgttatgtccagccccttttactcattcatataaatgaaaaggtatcgttgcaaacttagaagtttctgcctccaaaaagatgattaagagtgtacttcatttaagagaaactgaactgatggtcaggaaggcagaattgaattgtcaatataatcattgtgttaattcagtatttgtccaatctatgtctcatatgtgagtatgcattgcaaggaaaatgctaaatcatttcaatcagttaaaaggaattgtgctgtttccacctcttgcctattcaaatagaaatatctgggcaatgatgatatttaaattatatataatttgaaaaatatgtttctaaagaatatctacctctttatattatttattgggatgctagtgatatttctagctttgcattattcccaaaatcaaattccaaagcttttggaaaaaaaaactattcaggataagctatatggttataggaaacataaattcaagaaaatagagtattacctatatcagtgaatatatgcattaatctagtttattttgtgtaggaattgttttgaagaggatttctaattgaaggtggatttggatttattctcttggtattattcaacaaaaactaatattgcattggttcagataatttctcaggatattaaaaaggaaactaatgaaataaattgagtcaacatctaaaacataaatgctttgtacttggtgttctagttctcttaattactgtactttatttattctctcctttgtgagatttcagagcagtgaggctttaagttgctgtctagaaattagaaaaacaccagatatttgagttgtgtggccagtgggacactgcagcaaaaagactattcggaataagtttatttttaaaaagcactgctatcttaaaatctgcatctttaaaatggtaataaaaattattgttataaaatggatcgatttttgtgaaagcacacataaagtataatttagaaaattaaagtttcctttaattttactccatagagataatcattttaattacttcatatgtatattttttagatttttaaaaaataacatttaacttgcttacctagagaaattgggtaagactatatatatgttcttaaacgtggtcttttttttacttaaccatacatttagacatcttcaatgtcagtacacatagatttcattcattttaatatagtaagaatgctctataccataaaccctgcttttgttagtgaacactatcagattgttttccatttatcatcatttccaacattattacaatgaatagtctttttcacttatgagaacacttctgtgaattaaaattcttggcatggatattatagatttaatagtaatagcagtagccattggtaactcttgggtccttatcacagtgccaggtttgctgctgagcacatgcagtgctcagcactttttaatccttacaacagtcctgttaggaggtgtattttttatgtttctccattttaccactgaagaaaataaggcttaaaaagattaaattgctccccaaagtcatctagcaggtgagaaactaaatccagactccaacacaggtcgttctgactttccagcctatcactgtcctggccccatcacatgccagcaccacaattagaattgctccatccacatgctttctcttttctcagctccgcatccctctcagctctgcagttctggcagcccaatacagtaacctctcaaaacctcttcctttgccctcatgcctagagtcaggcctgagcagccagtctctctctctcttttgtgccgacacccttcctcaactacatattcgcctccgttcctgacactgcattcctggcaaacagtgcagcatccctaagtctgagaaagcgagagggaaagttccttctaggtttctgggatttataacacctttgctgtcagccagcagattccagctgaccagcagtctcagaagcagtcacaaagagcagttatcatcgtaaatcaagaagggaaaggcaagaaaaattactgcatgtacaatatgaaaagagtcataggtgctctttggtgttttgaattacactggcacagctagttattgggagcagctaaataaataaactgagagatgttggcattgtcatttggtaaaatgcatcacagaaaaccaccatagtgctgatgcttggacaagctaagtgaactagagtgtacaggtaacacagtatttgcacaggccctgggcaatctggaaggagtgcatttgtctggaattttgcacatgtccatcataccctgactgctttcataatctttctgtacttcacctatcaaacacatctttttttatctgttatttcttttttttttcttttctttttcttttattttttgaggcagagtctcgctctgtctcccaggctggagtgcaatggcgcgatctcagctcactgcaacctctgcctcctgggttcaagtgattctactgcctcagcctcctgagtagctgggattacaggtttttctgttatttctaagcaaagctgttttctaacatatttttgtgtagctctctgtctactagactgtgagatctctgtgggtatgtatcctatctcatttatcttttatcctcacctatattttcctctatccttttttccatcctttcttttatccctgtttattaaacacctcttctatgccaagcactgccaaacacatcatatccctggaggtacaatgatatgcgtgtaaggtacaaactctcactaggtttacagtctaatgaaagtgtcagataacctagatcattgcatagtatctggcacagagaagacactcagtaaatgcccatttattgcatttatgtattaaattcttcaaaataagcaaactgattcttaggattattaactgacttgctcagtcactggtagaactcaagttgcaattaccaggtctgccataatgccatttcccactagattgcccactagttattatgattgtggtacactcacatgagggtgctatgtcacatgtcacaatcagtgttaatgatgataagaattagcctgtgacacaagtaagtggtcaagggctgagtcccttcagttttccaatgtgagcatctgcatgaattttctaatccattatcctttgtccaaaggtatgtcttcttcttggcataggatccgcaaattggccttctgtctatgctatctatgtaaattatgaaaataattattcctatttcacaaattccatggtgctgttttcctccttagcagttttatgttttctcttattttatattttatttactttcttatgctagaattgttaccataaagcaaatttttcagtttaggcacatttaaattatatttagactatttcctagtgtttgactatattataagtaaaagaaaaacctctgggagatactgcttaaagaatgtcattgataagagtgcccatttgcacgaggtggataaatgcaggtacagcgtgcaactcaaaatcgttctgggaaagggcgatgatgaaaaactacttcagaacaatggaatatagccttcattaggcctcctcagggaaggcaaaacagagctttaaaacattggatgatggaagatgataatgacgatgcatcagttttatcttatgtaaattactgaaaaaaatcaaatcatttaatcttaaacccacagcttattgtttgtaagttagatgagaaggactgagtcactcttgctttctctccacagagtaataactgtaaatctcactctatatgttcgcttctacgctgcatcttcagctaataaccaccattaataatattctgcaatcaggctgcagggttgttagatggttactgtagtgggtctgtaggtgaactgaatttattttttcataaagaagttaattggacaagtaatttttgggcgatgtctttggaaatgtgtgcattctcagagtgtgtgaatgtatgtggcacacatatgtatttgtatagcctagcagtttactcagtacacactttttagaaaacaagatttttgggttaaagaatattgagttaagcttatgtgtgggaacctctaaggaaaaacaggtcattttaaatattttgttgacttcaaatcaaacagttctacaaattaaaaagaagcttggcatgtgccgtggtagacaataatgtaatgaaaacaggccattatttaatttaaacccctgggaattctagtattggtttatatatgtgtccaatactttctctctgaaaatggtggcacagtataggtgttaaataaatgctgaagattaaagacttctgcatatgtgccctccgcctcatttgcttattgacagatttcattttaaaagaccttagggagactgaagtgccccaagcgccctgaacaaagtctggaagacagttgtctgcaaagtcatgcttctctagagacaggaaaggaccagactatagctgtatttagactattggaataattggactgcatattgatagaatggcttattttaatcatcttaatgaggtaccaaatccaatagattacacagaaacgaaagggcctaaataccaagttagtgtctgaacagctaattctatggggatgtatacattatgtgaatgaaaatatttgtctgcatctttctcatcacacacacaaacaaatacagttacaaattcatatacactaaataccataagtcccatgggaattatatcagctgctagaacaaaccagaaaggcatggaaacagtgctcaattgcaaagaatgaaacaccagcttttatgcagcctaagaattgtagtatgttaaaacaacccctaatgatttgatgacaggacttctgattgggcaactgggtaatttgcaaccttatcaaaactctgtgaatctttttctagattaatgctgctcatgaatagataattctgagcatattctgcatgcaggaaatagaaaagggtaaagccatgaacctagatttcatacagagagctatacatgaacaaaggaatttttaggttggcactgtacactataggtaggagatatgggaaaaatatgaataatttccatgaattcctctaaggactcatatgtgaaatagaggagaggctgctggggttttttttttttttttttttttttttttggtagactcatctttgttttgctttaatttgctctcagaataaaacacagcagaattgtcctttagggggcttttactatggattggttagttactttattgactgtgtattaacactctctgaactacgtgttctgcctgtttttttactaaattatactttccaatctaggcagatggtggtgtctgctttggaggcacattttgttgtcctttttttttacacgtgtctgctatttcctggggtcatgtccatctcatattttagtagtcaacaatgaaagattaaattacaaagtacagggaaaagaatgtaggatttcatttcgttcatttattaatcccttagttaattctataaagcatttatttgtgtcagatactgtaattaagtgcaattttaaaaaatcccagattttttatgctctctcttagacctgcccaaatgattccatccgtatctccagaattagttactgcaataaatttggtttcctccagacatttcctcatgtttttctctattgtatcttccactctattctctaagtctttgtctggctttgcatggctaaaagcccattcaaatgatttttctgaacacaacagctttcttttcacagaggtgaactctgatccttacctttctgggcaccaagaattagaggagggtttgaaattatttttcccctatatcctgccaagatcttgctcagtgtcccactctcatctggttcctactagcaatcatttcattaaatggaaagcttttctcaaatattggggagcctaaccctgattggataagggagaaagaggcatgaaagaacaagggagaggaaaaggcagagtttaaaagggtcattgtctttttgcagaagaaacatcttctgccccttattcaggacagctaagagcactggttcctccagaatggggtccccacttagtaatcgtttagaagcaatcctgagggtgttgctgtagcttggtttaatctgtttcatattatttttttcaaagtaggcagatataggaactgggtctctggagggtaatccatgccttccaagagggccatgcaggtgatgtttttctatcaaaccaaggaggttggtagctgctcacttctagcagcacaggaaataaaacatttgcaggctggatgttgctattactattctagatatcagagaaaaagttataatcttctgaaaagcataattttttatctattacatttgaattctataactgagtgccttacatattgtctgatctaatctcattttacggaaagaactgaatcccacagatgttagcagtagcctgtattattgagcacgtccttagcgtcagacatacagatataatgtactctagagatcttttaactctcgcaacaaccctaaactctaaaaagtaggttccttgggattgccataatatattgatagataaagaggcaaaagcataaggttaagtaacttgcacaaagtcgtacaatctagaaaatggcagagacttgaacctagatcttaatggctccaaagcccatgctcttaacctcaatgttaaactgtataatctaatagggttattatagctcccagttcttatgaccctaccttctaattctctctcaaatccatagtctggactagtgattctcaaacatgagcatgcaccacagtcatctggaagacttgccaaacacagggtactgggtctgtggtggacagactctaaggtggcccccacgatccctgtcccttggtgtgcacaccttggtataatccccttctcttgtgcaagggatctgtgtcttgtttctaagcaatagaaaatagcaaaggtgatggggtgtcacccttacgattacaatagcttatataagactctgacttgctagcagatttatttcagagagtctttgctggatggatggagtaagtagccatgctgagcaagctcatgcagcaaggacctgcagggcagcctccagatgacagccagcaagaagccagggatcacagtcctataaccacaagtgaattaattctaccggcagcctgaataagcttgtaagtgattcttcccatgttgaacttccagaagagaacacagcctgtctgacactttgattgcagccctatagaaccctgaggagaggacttagctaagtggtacccagactcctggcccatgggaactatgaaatgataaatattttctgttttaagctgctaattttgtagcaatttgttacacagaaataaataactagcaccgcccccccccccgccccccaaccagccctgagtttcttactcagtagacctggcacaataatttgtacttataagaagattccagaggtcagtgatgctactggtccagggaccgcactttaagaatcagttcctagatgtagagaatcccattatatcctacttgtcctccctatactttcaagtttccctcctctgcctagaaccatcccccaggctccttttggattaacttctgatctctctttagataaactcatacttacctttcagtttaagtgttatttgctcagcaaagccttctcccacctcagcctggatgaggagtctttgttacacactgactaaaagcacgggcactgaaatccacctgcctgggtttgaatttcagctctgccacttactagctgtaaaatcatgggcaaatttattaacctttctatgtctccatttcctcaacactaaagtgataagcacaggttacttcataaaactaggaaagttaatatcttccatattaaaattgggtgatagtagtagcttactccatccacctaggagagtcaaataaggtaagtgcatagtactatgcctggtgagtaagttctcagtaaatggtgttggtggtggttgcattttgtgttgatgttactcttgtgatctctcatagacgcatttacttcactgcttagaattctgcatttgttaatgtgaatgcttatctcactttctagatgataaattccatgagaatgagaaccatgcccactcttgcttctcatgttagccctagcacttagggcagtacctggcagaacaggaatagtaaaaaattacaatatatatttgatgaatgaatgaatactctcagggctagagccacactctggaggcctattcccgatcattatgcattttttccatctggttggaatgcactttcctctgtatttagtccccgaatgtacttatcctttcgccctgctcttcactcaattgtggtgagatcttatggagagtctgttaggttggtccttggtctgggattgcagtggcctctatacgatagtttgtttttgccatggaacatagaggagagttggtcatggataattgtacttgggtacaaatttttaaaaaagtacaaaaaaaagcaaaacatctttgctttttgagattttccttcttactttaatatctttccaaatttataacacctaccagatgctaataggacatcattgctctatatcaaactatattagttcctctctgagatgaagaagggtgtatccagaactcagctactgtttgtcgggctggacggagtaggggaaaatacattatgacacagctctctgcagaaggctgaaaagtagctcagttccattcttgattccaaaaagttaaatgagttttcgtagtttttttctttttctttttttttttttttactttctcccatgagcagcgaaagaggcagctcagaaaactagtctgcagggttctctggagatgttttccctccctaccccatttcattaacctttcttctgaaactacttttgaatgtctgggtttaattaagagattctgcatgcagtatggaaagagcccatctctccttttggcttattccttcatctgatttgggttgaaaatatacttttttaagaattagttataattgtttttgacaaaagaaatagctcttttttatgtctgcaaatccttaatgctggcttatatgcagctaatgatgatagccatcggcataatcagttctaatggtctctactgtctttctagctttgcatataggaatgtaattcaaatttcagaaaggctggggctgaatggctctttgttctgcatttaaaatattactacagtgttcactggaaagaggtctgttattacaaactggatttgagtctcaactttactttgtagctctgggaacctgggtagattcttgagttctcttaggctgtctcctctcctttcagataacttcctgagaagtggagactatcaaaaaacattgtgtatgaaaggattttgtatgctgtaaagtggtggggtttttgtttgtttgttttgtttgtctgcttgttttttgctgttgttgttgcttttacctagaagtgattattatttctaattcaaatcatcctcccaaagattttttttgaatttctttggatgttgcattgaaggaaaaaagctcaatttttatcctgagttttaaaaaattagacagtaaaaccttaaattggttagcagttgcagtttataaagcattcatagaattcataaaacattttctcacacattagcctgttcccagtcttctggaggaaaggggctgctgatcttgctaggcagcttgatgtatatatttcatttaatccagaaaccttacaagatagctaaaattagcttcactttttagataggaaaacttaggatcaaggtccaaggtcataaggtttgaactcccatctttataattcatcatttccttgacctcggtggcataattctcttctgtgaagaggattgtaaataaaacagttaggggccttgagtttgcctagaggaccattattgaaattcttctttcaaatcttaacgtttccctatgttagcagagaaaaatgggattaggaaggacctttaatgattgattcctctacttagatgtcaagaaaggccattgtaaccacagcaaagatttagcactcaagtactctagcttagtgactctcagctggtgccaattctcccttcctcctgtccctaagggacattggcctatatctggagccatttatttgccacaactggccaggtactatgggtatctaatggatagagaccagagatgctgcaaaacctactgcaatacacaggagagccctacctttcacacaaagaattgtaagtcccaacatattaatagtgctcagctgagaaaccttgtgggaagaatcaggaaggcttcctggagaatggggatactacaactgggattttgaagataatttaaaattctccaagcagacaatggaaggaaaggcattccagacaaagagtatggcatttgaaaaagtatagaggcctgaaatagtgctgtatatgtaggaatttctgggctctttggcattgctgtagcatttctgggaggagcagtagggggatgacattagagcaatgtgttgagtttcttttctccaacagtaattcacattaagagtagaattgtaaattcgttttgttcctgaggataattctttctgctagacaacctgtgaccattgtcaccagttcttaagagagtcatgcagagactactcttgatcgatgatacaggtgggtagcctggccatggctcttgacagacctgtgcttattttctttcagtgggcacctataaggattgaaccacaggaaggtgatgtaccaccctgagctgaatacttcctcactagcttttttgtatccacagcccctgtatccatctgcgtggtctatattccaaagtagtttgatggggcagcatgcagaagtgtgttcttatgcagtaatatagtggtactcagtgtgttcttatgcagtaattgctctccagccaaagcaatttgctagacctaggtgattctgaactaatttgtaattatatatgtactcctattacagaagattgccctcctttgtgttttaacacagcttcaatttggttaaaataatcctatttaatgaatgctattcatcaactatatatatatttccatccatccatccatccatccatccatccatccatccatccatccattcatccatccatccatccatgctcactaaccttggtttgagtttgagtcctggctttagcatttgcttgctgtgtgactactggcaaatgctttaacctctctaagatgcaatttccacatctttaaaatggagatcataataattagcaaggttgtattctgtaccagagataatacgtgaataatctaaaacagtgatgtattagtagtagtagatttgctaaataaatggtagctttattattattgctactatgacaatgatgatgacagtgtccagagcactttaatctatggtttggaagataggaaggttgataaatcccttcctatcttttggagttcatactgggagcttcccctctccagcccaacataattgataccacatggtcccaacatctaaatctggtaccaaccctgtggcagcaacagaaagcctgagctttgtgaccttgggtaggttatttaacttctctgagcatcacttggtaatttgcaagaattaaatgaaataaaacatttaaaattcttggcactcagtagatgctgaacaaatgctggttcccttctccctgaggcagtcatcatcaagatgttctgtgggtttcactgctggcaaaaacaaatgaggttaaataaaagtcagaggtgaaaataagaggagttaacagagtttctgttttgttttttctttacattttctacaatttacagagattcttctctccctcaaacttaagtagatttcaaacgacttgtcattctcaaggtgaaatttatttttatgctttcttctctaagtctagtcaagacgtttctcatagatgggtttgacctttgatggagatgtctcaaacctgcctgcaccattctccagaaatgaatattttttccccaatcctagcttgaattctcagaatttctcctccagataagtcacttctgccctggcctcttggtttgtttgcattagaccctcagataatgggcagaagtttcctccctatgcccagagctcttgccctttggctgttggccttactctgagctgcagacactggctccttactggtggtgttcctgccttaagtacttagagttcccctggcctggactgaactctgcctagaactcagatctcttaaataagcttcctctcaatcttttgttattttcacagacacctgcacggcttgctgtgctttgaatacactaacacttcactcatgctgactggatgggtcttccacactcaaggatgggcttgaatgttccttctaggcctcaactgggaggactctgcttcttcccatgtgtcacatagcacttgtaatacttacagtgtgtgtccccagcaagatttttgagttcctaggtgacaggagctatgaagagtcaatctgctctgaatcctttaggatgtggcctagtgcttataattaaggagacagagaaggaagcaaaagggactaacagacgtgctgaaggctagtggtaacaatgcagcatgagttgatggctcaaacttcattctattagtacccctgggaatgaaccacatgggaagtgaagacaccaggagatacaggagtttctgaggctgaacaggaatcagcagtgggctgcaagaatgacctagtggaatgagcagaagctacacagacctgagagaagtcttaattctgtcatttaacagctgtatgatctcatgcaaattgtgtaagttatctgattctattttttttttttttttggtaaaaatgtgatgttttggtttgttttcacactgctataaagaaatacctgagaatggcaggagagagagagtgagtgcaggggaaaacttatattttaaaccattagatctcattgagaactccctcactatcacgagaacaacatggaggaaactgcccccatgatccaaccacctcacaccagggtccctccctcaacatgtggggattataattccagatgagatttggttggggacacagagccaaaccgtatcatgtggctactatcatctacttagggataatgcatttggcccataatagtcactcaataaaatatcattattgttaattttggaatggaggatgtacatacccaaatatatgagtgaatttcatgttgtctccagcatataagtattacattgtctgagtacactgtagcttctacttttataactgtgatcaccatgtataaactacatgtaacaaacatgtagtgtgtcaatcactgtgtgggtacttttatgcatcttcttatttaatttttaataactgtagcataagagtttccgttatcatacatattatagagatgaggaaattattacaatatttaggcaacttgcccaatatttctcataattaataattgggatttatagccaagccatcctattgcagaacctgccctccttgccagtatcctaaatgctgcttccagtgttgtcaggaaacacttaacagaacatgtggaaaatgtgattcctaccttataaaatcttatatttcaaggctcccaatattgaccatcaggaacggttcataggaccaggtaatcccaacacattaataaccctaatacatgaattatttgtttgaataatgagaccacgaaacattatatagggacagcatgaaaactgatttaggaaatgaatttttgatattcttctttaaaatgctcaggttagcagatatacatactgatttgcaatagaaagaaaatcaacaaccatgtagcgtggttttttttctttcctgctagtccataaccttctcaagcatatgcagcatcttctgtttaataataaattattgtatttgcctagcaaattatacatttcaaagaggttttgtaaacttgtcttatttgatccacatagcaaagcagcgaggtagacagaacaagggacagtattctttatgagtagatgaaatggctgaggttcttagcaagggttagttatccaaggtcacacagttaattagtgacagagctggggctggaatccaggtttctctgcccagcgcgcatctcccaaatgcctagttcagtgggattggacagctgcaacaatttgtgtacaatgaagtgttcaacaaatgttgactggcttgtttggctcaaaacaattgaagatatttttcactatgattttcattgtttctctaaagtagcttaggagcacattatctctagtttgctggtgtggaggagagaagcagaaagcaaccattgatcagctttgaaagttgtttactgagacacctagaaagttttcagaggagagaagtttgctgtttcaatcattgacacatggactatcctgtcttcagtcatagctgggtataatctccctgtacctagtaaaatggagttcagctttacattgcagagaacacccatccaactccagtgatttctgagacataacatccaaaacaagatcctcagagagtaataacactatgtacacagtgtactgttttttcagacccttgatagagtaatttaacagagctgtgtagtgtgagctacatgggctggagatgattttgattcttaattctcagctatttgaacccaaatcagctggtttaaatcagagttgaagagacacttccaagtgttagctatttattttggtaacctgcaaaatctttactagacatgcattttctgtagtgttgatccatccaaaagatgagcacaaccaattttcagtgtgtaaatttggagactgttgattgattaaatctgttgtgcgcatttgggtgaggtcttcagttagggtcacttggccagcacataaccaccctttcaaccgtcttacctaccgaatggacaattaatacaagctgctgggtttcgtaacgtatgtagccttttgcttaaagagtgttcaggctaaatcgagattttgctcaattctaccctcagtgcctaatgcataagagtcagtaaatatttgttgcatgaatacaatatagtgtcataaaccttctccatctgtgccccctgcctctccaccgcaccctctgctgttccccctccctacttctaacctgggaccacactttttattgcttcttagaaaatatcttcttccatagccccatctcttgcctggtgatcttattcatcctgggaacccagattacatttccttcctccgtgggacattcacacatgcccaaatcagagttcacagtgacccccatgtgcctcttctccccctgcacttattgtcacctatctgggatggggttgctctatgtgctgctaggttgtaaccgtgactgcggtgagcctctgttttattctcacttgtaattctgtctctagggcagtggtggggacactgtggacacttactaattccttgttgggttgaaggaaggaaggaatgatgcctgcagccccacggtgttagatttgcaaatcactttaggaaaggaggaaaggggttatgttttataatatgagagttgagttttaagagactctctggttttattggagagtgccagaagaggcactgaaggcaacaccccagacctgggaaaggttaaagattctggttttcattcactgcaatgatcctaaacatgactcccgtgctatttccactttacaagcttcacaatgatgacttcaacactcagtgcaccccaggctggcccttgtttggcctcctcacttggatcaagtgtatttcgaatggaacctgacttaggtgatgcgattcagtagcatttgtctggagtttgtctggaattctatagcctagattaggtttctctagtactagtttccatagacgcctgggcttccccttccatacctaatttagtgcccagctagtgtcacatttctgtccccttagccttccatggcaccagaaaagggaccacaaccccctttctgctgcctggcactcacattctgagcccttttgttagataatgagtttgtatcaagagggttacttctacagagaagatacaaattcaagttaatgtctgtgcattttaaatgccaccaacagatgcgtaatgaagagctcttggttggaaaaaataatattttttatggaaaactctacacaaatagaagctgaagttgatgcagctcttgcacatacatttttctcttttaattttcttgactcccttgtgaggtgtcattctcatctccatcttataaagagggaaactgaggctgtgagaaatgtaatagttggctggaggtcacacagctacttaatgacagagtcacaacttgacccaagcctgtctccagatttatgatatgacatcatctgataattattgaggtgacacagtttaaattagtcagaagctatctatcaataggacaaggatactatatgaaggaatccagcttgtggtcagttttgtaaggtctcacttaaaagcaaatttggaggagagagggcttttctaagtctcttctctctacagcccagcaattagatggagcctcggatgaggtggtttgtaatctttaatatcggtagcatacttctgggggagacttttctgcaagcgaaacaggcataaacacaagagaatctggttttcagatcccttttatgttgactcaacagatatttatgatagtctttgttgttccaaattcacatgctgaggcctgggggtagagtggtgtggcagggacagatggacctgctcctactctcaaagaactgaccatctaacattttactcactgttactctcttgctcttattttttttttccacaaatgggactttttatctaccactattaaaagtctgaactttaaaaagatttttgggctggtgatccatatccatcagctcattcaacttagcaccactttcattcccagtagcttttccagaacttctgccttctccatgaagctccatgagttttcccaattcaaacttgggcttcttcagcatttttacttttctaacaaaaacatcatgaagaggataaatagatcggcaagccttttctttgtcttttccgatgctgtctggaatctatttattgaccatttctttcaaattatttgtctgtacctctcaggtcatgacttccttcaaatttggtggacctgttggtgctgagtgtaagaggtcctctgtctctggtatctgaccattgcacatttttagtaaaactgacacagaacagacaaagcaaataaccatctatagttttaacagcaacatgagcttcaataatgatctgccactttttgaccatgaaacacattttgtcatgggcaagattcatgtcatggaagttttcaggcagtttttgccctgaacatctttagtaattggcttgaattttctgaatgcaatttcatcattctgcacatcaccaagactcacctcaatcagtccacccttgaagccatcagatacaaaatcggttccatgagtccctatgaccagtgcctttccaatatttcttatactgaacatagcaggtgcttttacattataccaatatatcttagaaaatgaagcaaccactttcttctcggttccctttttgccaccttttgtatggcacttgttcttgctaaccgtcatggtgctgctcagagagccaaaaggctatctttctcttaaaagtaactttaaccttcatgtgtttatagagatgtaaactgctattccttttattttttcaattttatattttgttatgtgttattttggtatcattcatttagcaagcatttattgaagacctactctgcaccctaccttgtgctgggtgctgttgatacagaggcagttactacacaacctctgaccttgagtaggtatgtcaaaagggaagagaatggtaagtgctttattaatcgtacacaaaatttgttttggaaatacagtggatgaagttactaattctgctaaggagagacaggaaaggaattgggaaagtctctatatggtgtgggctggcccaattgtctaagttcatttcctgagtgctggcttggaatcatgtattttattatataaagtgcaactgccatttactatttaaagattaattaaaagtgattacctaatgaaatcttaataaatagtacccagtagagtatgcctttagtattcattgatttaatatcaacggttttgattattcaagaactactttgtaggtgtttgacataggcagtcctgattttgctgagaatctaatttttatcacctggttttgggatgctgatagcaaaaaaatttgcagagaccctgaccctagctgactgcccagcatccacatctgagcttggctatgttgttcacagtgtcatcttgagtcatctatgtgaacaaagtcttgatcttgtgtgtgtgtatgtgtgtgtatgtgtgtgtgtgtgtgtgtgtgtgtgtgtgtgaaaagtcaccatgattagaaagaataaaccctcagaaacttacaaagtcagttagctggtgttggaagtggatacacaagaagtgtgacttccctcaggaaagtgatagaatagagctagaagagactgtaacagcatcagagcttggagtattaattctcagggtatccattccctttacaaatgtcaggggtctgatagctatagaaatttctgatgttcagattgggactgaaatctaagcaatatgctagtgatagtaagggtaaataatgtaaaatttaaaatgttttcattcctccttgaggttttacattctccactggatctgtagactgagaaaatgcctgtcatgtaggagatgcttaatgaatatttgttgactaaaatttagaaggctaggctcattgacattaaaatgctaagacctgtcacacatatcatatatttatttttccctttaaggatgaattccaaaagattgtattggaccatacagtattaaattagactatgttattatgtaatttaatttaatttaatttcagatatggtcatagataatctatcaagtacttttatgatctataaggtatttttttcttctaggaatggttttgtgttggagattaaaaatacctgtatttatcaggacaagattgatgccctaaaatgctggctaacgtaattaggctgattgtaaaagaaatttgaaggaggaaaaatatgatgaaatgtttcaaaatagtgacatctgttacatcagtgcctaatgtgcatttttcctttatatatttctatctctctccctggaaacatccttcttggaagttttcccattatcagaacaaagtgcgaagaggtaattttttcaagtcagatgtgacagaacacacatcagcattcaggaatgaggcttttgcaataggtaatagtgtaatcggttttgccagcagcagaatgtacaatcctattagagttgtggaaaaggaaaagtatcaccttaatttacctccaggcaatacagcaataacttgaggtgcctagggctgctgtgtaaagatactttaatcacatagtaaaaacagttttagtctactgcctactttagatgagggaagactctcctaagttaataaatgaattttatccagcatacagtctggcaatcatgatatgctatttttaatctttttcaacattaaatctgttaaagaaatttatcaggttacaatgagatcgatttcccccttacattccctatgttcattgcaggaaaattggatgacagcttttggatgagactgatagtgcacaagaaggaattgctccaaaattaagggaagtcagagtttcattccacaagcttcaaatagaagccgctttctattgtcttgtacctttgggactgaactcattatagtaaccatcaaactagaaagtcttcagctgggggtatttctcatgtttgctttctggctgtatggggaatgtgatctttaattagttcaggttgtaaaatattgcagagaatttcccaggcacactttgctttgtggtctaggtcagcaaatgcaattctgttttaattgtggctgagctattgtcttagactggtattcctagagtgccttttaccaattaatggtaatatactactgggaaatcatgttgccttgtggaagcctgtaaatagcaaagccctaataggctgtctattaatagcaatacagagtcagagacctaatgccattaaatggcggtattcatgtgtgaaagccgtctagtaactactttaaggaatttcaacagtcatttgtgtgtgtgggaagtgcgtgtgtgtgggaagtgtatgcatgtgcgcatgcctgttttcctcctgtctttctctcttctttgtctttttgttgggcttttttctaatatgaatttccattttctgtcaactctttatgatggattgggttcagggaagcaacatgtgccagtcgttgcctttgaacctgtacttcagatatgtggcattttattttctctcctgcctcttggcttatcatcaattctagcagtgaattttgacatgtgcaaattaataatcattcagtccaaatgaatacagtgacctctgtgcccacatgatgtactaaaaggagaggatgccatgcttatgaactcgaggagttcacaacttaatgagaggagcaaaaatgcacgcgcgcgtgtgtgtgtatttccacctgtctctaataggctgtcaagttataatagtttaatgtaatcacatgctttttacatttgtacgtgatagactcctgagaataatagttaattttgtgaaagaattaaaaattgaagtgacctgtctagtttggaaagctgggccggcagcaaggcaagaaaaaattacagggataaacataaatctttcaccatagaaatcagtgtggagagatggtctaagagttcatttaaaaaatgccttgatgttttaggtgaccataacctggagatgaagcagaggatagggtagtttgttcctatgaagtctaatgcagtctctgaggacagtgatagacaagtgtgggttttagatgaaccagttctcagaatctagttctttgttctgagcaggccaatgcatcaggagtattgcattagaagatattttcactctgaataacatctaggagaagatgaacagcactggggaagggatgagtaacaggcatcttataagagtgatgtccaaagacaactagcaatattgaatccagaggaggaaaagcagagagaagatagattcacttagtgttttaagacatgtgaagcagaagaggctgaatctctattctgcgctgtttcaatgggtggaaagtgtaggcaggcaaatatatggacaggatatgaaaaaatatcttcctaacaattgcaactactgctggaatggcaaggcttgggaagtagtgagctcaagactattggcctttcacccagaccaaaaggatgctaaccattgaggctttccatagatgggcatttgtatttgatcatcatgatgtacttattgtgctgaggttctcaagatgtgtggaatgatcatgaatgcaaatcctgcttctatcatttgcgtgatgtaaccttgaaaaggttactaaaactttaaaatctgtttcctcatttctaaaatgggtttaatataatgcctgtacgtacagtgaagtaaacactcaaaggtagcctattgctctaatcttattaaagcacctatttggccttgttggctttagtctgagaagtgaacttaattaagactagctggtgaagtcctgatgtaaggttcagttcacagtcccttggtgttagggttccatttttcagctgagtgtgaagaggctgctagcagtttcagagtgtggcaacaagaaaatttccatcgactttgcttacttgtgtccatagattttggaaaataatgtttgattcttgcattttaataaaatacctgattataatatgcatattgccttaccaaaaaaagtagtagtcattttaaaatagtaatattagcagctatgattagtaatatttaaagagtccttattatgtgccaggcactgtgctaagcagtttacatagtaaatagtgtttactatcattagtattgtaacaggtggattaaatgcattatattctttaagtctgaagcaactttatgagatagtattcctattttataggtaaggaaacaggtacctagaagaagttgttacttccacaagggcatatcactaataaatgaaataaataaaattaggatctttcagctgaactctcattgtgccacctgactctagaatcaatctctcaacctctctctttcttttgttctcacacaaacataagttttaaaaattgctatttattctcattacagacaacacactctgatttttttcattttactaaaaaatacacatgtctggtctattacattgattccctatcttaagttgatcattactaaatataatttaaaaaataatgcacacttgtttcattttgttcttgtggtaatacaaagttctctataccttagatggattacagttctcacatatgtaaagggatttgctttgtgctcttttgagatggtcccttgaagcagtgtcattttatagtggcagaggttatggtgaaggagaggcacattttatgaatcacattgtccaaataaattactgctgtcatctgaattcaaagagatacattgttccaaatcagagccctaagtgacttgaacatttccatcacagattgtgaattattatgtaatggaagctaactagttgtagtttttcattttagagcagccataactgtcaggtccacatcatatgccaaaaacaagttgtgccatggaaaacacaatgtgagagccagaagaccacacagattccatgaatgagccagacttcttgggaggtcagtactcagacctgggcattaaaggagcagctctaatttgttttagtaatttttccacccatctttttttcaatggttcctagctactactatgcctgtttgtttaagtagcatttgaaacctctctggtctctgctcagcactcaactttgatagcagaaacagaaggaagggtttccaaaagactgttggtcctgaacaactattacttaggggtttaatattggttctctgcaggaaacatgcaaatgactgattacccactaaaaataaagccttttatagctgattttaaaatcctatgttgcctatgtctttgaaacactctttaattgcttatgaatatattatacttttgcctccttttccttgttataatttctctttctacaagaatagctatcttggtggaatttattgatttccccaacaagatttacctgttagcattttctctggcaggacgttcttgtgactggctgcagttcaggaatgtttccctttcatttggtacacatttgcctagtgatatgtgtatcaggtactgggaggacagaagacgaataagacattgctctcctgtaaaacactcattcaatagtcagacatagaaaactgcagaattgtgtattaaatgccaaaataagggtaggttataagtatggtggtgaaatgagtgcatgtctgttttggaattaatgacatgacttcataaagaaggaagtgttcagtttgtgtcttaaagtgtgtgtattattgaggggtggggaggtaggtggttatttcaggcagaacaatgcaatgcactttagaaacattcagatggttctgaggtatctggagtagacaggtggatggagcagtgagtggagggagatgaggtaggacagaagagaggaaagttcctggaggtggttgtgtgtgcctactagagactgtccaggcctgcctgctacctccgttgaaccaattcctgatgctgatgcaaccatcagatcatgtatgggccagctttttctgattaagggctcttgaacttctgctggggagaatggttctgactgatgctgcttccacaactgttgttgggcttctttgaactttcctggacgactagatattacacttgattcctggctgtgggtgtctgtttccctggtctgagagtctggctgtgcagcagatgcattttggaggagctgaagctgaaagtgccagtgtggtgctggtgtgcatcactgccctctctgggatatctctgcagcagagcaaggttacagagctacatctgccgcagctttctgtgagttgtgtaaaaagactgtgccaaccagtggggagcttacattttcttatatgggattcctactattttaattaaatattgcttttagcagctcttcctatttctaccctcctgggactaactaggtgtttgtttgtttgtttgttttgccttacaactcatcaccacatataggacattgttaatagatgtgataaatgataataattctctgctggactcttcctgcacagtcaggagtcaaagccccactggaagaagaaacattattcactcattcaacaaatatttattgttcgtgtactatgtgcaataactgtcaggcactctgtaggcgctggactccatgttgagtaagacaggaaggatcctctctgccctgggggatattacagtctgtctagttgcggggtgggggataactataaacaccataattaaggtcacgtgcaatgacatctactcctcagaaaggcaggacagcatatctgtggctacagagcatgcctaagattttgggcaggtagctggtcagaactgacctcaaaaccaaaaattccccataaaacacacagtccagaatggtctccttgaactctagggctgttcctaatttctcttttaacagcacattttgcatttttgcaaacctttctgttgcaacctcacataggtaactgaaatttcacttctgttgaactcaaactctagatatgtgaagagaagaaaggtggttgtagaatggccccaagatcctcctttctggacgcctttcctcttttctctttgctgctagcttttccttattgtctgacctaaattgagccaaaagctacaaatattgaggaatacctccacaataccattctcatgcatttttgcttcagtgagccagctttcctttggatattggatatgttatcagtaatgtacatacaatataactataactagcatcagaatccttcatttgagccattcacacaatttttaaatagtatgttaatataaggtcagaatatttttcatattatcttgaattttcacagaagtccagatttcacactattattgcctttttccaagttcctaatatagttgtttctgattatatgcatgttatctgcttcacattatgagcagtgcttaaataaatgttcttacaaaggggaaaaattatcatgatttttcttccccggcttgaagaaactgcatatcaatttgtttgcaaatctcaataatttgttctaaaactaacattgacctgtattggtatttacacagcttacgatcactaagcacatttaaatatagaaatttttaaagaactagtctatctgcaacataaaggcagcatggtgacaacaggctaatattaaaaacagccttctcttttctcctcttcttttcccttctcactgtgagtcaacatccatgcatttaacagatattcaagctgtgtgcatatgcacactgaattctgttttaaggaatatagaggagaattcttctgttttcttgtcaaagctggtctaacacagtgagttagtatttatcgaagtcttgtcagtgcctctggtgctgtcgacagagcaagtgggcacatttcatctcaattaccaaaagaagatgaatacaaggcgggatgtgtgtgtcagaggttagagccatttaatgggatgaaatgtgaatgaaaattggagaacaatccaagaaatctatagaagatgagaactggagaaactcaattagagaaaaccatacacttccctccttctggaccctggtttctttgtgctattgtagttgcttatttggttataaataggaaagcaaagagtttattgtttccattgtgaagaaaaggcaaggtagttttgaggatttcactcatgtactctgatgcttttatatgtatatatatgtgtgggggtgtgtgtatatacacacatatatgtacacatatatatacacatgtatatatacacacatacatatatagggtgtatatatatacacacacatatcctatatctgtacaccctatataacatatatgtgtgtatatacgtataggaaaattggaggagatgtggaatatatacatatatacacatatatgtacacatatgcacacatgtgtacatatacatgtatatatacaacatatacatgtatatgtacatatataggatacatacacaccctatatatatacacacatatacacacatcctatataacatatgtgtatatgtgtgcatgtgtatatgccccttataacacacacgcacaccctgtgtgtgtttgcatgtgcgtgtataccccctataaccgaatcaaccaaacctaattactgtaccaaagtatgacattggctatgtgattgtgtcaacactggtcaaaggaaaaggcagtttggtgagatttaacctaaaaggatgaaagaaaatagacattctgtagggcacttttcccatcgtaggcttttataaacttgtcataataaatgtagttataagtttttaagtcacacaacatacatagttgaaggaagaaacaataatacaaaactaagaccccaatctgtcttcctttgcttgttttgtgtttcacttccattacctagaatgtgttttccaggggattaaattttgctattttggtcaaagttgtctctgtgtcatatgtgcagttatctttgcaaccccagtaaaaatgttttcttggtaaacataaaatcacctgtgaaagagtgcattcattcacttgagaaaagaataagtgagctatatgctttcattattttattgagaaattactgaaggctgttactttataaggggtagcaagtatgagatttgtatcagggttgatgtagctttacttacgtttttcagattctgatacagaaaaaatgaaaaaaagtgttctttttgccttggagaaaaagttatctgaaaaggaaaatttccacaaagtttcagcgtaaaaggagagaagttcaagtccattcattacatttttaagagtatattttgtcctgtctggcatatctcacggaggaaatagttgggcttttgagaatatgtgggtgtgggcatatgcaccaaggatttgcccaagtcatttcactttagggaaccttttttccaagtgtaacttcgtgaaagagaaaaggcttttctaagcaaaactcaaattctcagcccaaatgcttagagactccagatactctttgtgctaagttagagagtcggtattaaataagtctaaaaattggattaaagtatggctaatatctgacagcacatccacctgaaaatgttcttgcttgaagagctgaaggttatgttctgacattttatttaaaaatcccacaacacttttcaaggctgaagaattcaaagttttgtggacaaattttaatttaaattatgcctcatgcaaaatcttctcagcagaattttcagcactatctttctatcaacatcaacatcaatgatgttttatcttactaaacatcatggaattttgtccttgagtaaaattatcaaaatacaaaaaggagcagtttaaggatgttaatttatgaaatcagttattatctctctacatggtaaatgatagtatttttaatttttgtgttttttcccaacaaataatgcaaatcttataacgatttaatcaaaatgtgatctgaaactgctggttaaaatataattgacacaatctttctggaaggcaatttagtcaaatgcatttaaaaatgtgtatctcctttgacctgtcaattctacttttgtgaacttatcctaaagagtaattgaaaaaagatagggatacaagtttattcatctaaacatgagttataatagtgaaaaattttaaaatgacctaataagtgacctagcaagagtggacttcattaagtaaatggtaaacatcacatgaatatttcagccaatatttattgagcacctcatgtgtgtgtgctagacactcttctagggtatatggcagtgatggaggagagaacattcttacacatagtttacattttagtgtgttattggactagtgggcaagtggacatcactacagtcattaaaaatgagtcatagaactaaagttattaatgcggaaagatgttccatgtacaatggtgagaatatattaaggaatggtaaaaactgcagttacttttgcacctaaataaaactacagataaatatactgctttggggtgaaaataatatagaacaaaggcaatgcaacaaagacaccaacagttattatctctggatcatgacataatcagcactttaaaaacatatttatatttcatattttcttctacagtgaagtgttgattttttaaatgcagagatttgcctagtaattagtttgaatgctccaaaagtttctgctgttcaaaagattcatctatcttctacctatctgcttgtctgtttatctatgtatctatctctgaagcaagaatagaaataaacttcagcttccttcagatagctatttctgtgttcactgaccattatcgtcagaaaatatttctagatatctaactgaaatctgttgtgctgaagtttatgtccatttcttcttctcaagaaatagaatccagtgaccacacttcatgttacaacctccacgttttcagtcacttcacacaagccatgtctcgacttcatttcatatattctctgagggtgttttttccattgctctaggtttcaaccttcctttctttctgtgtgtatgaatctataccattgtgctgtgtatggtggttatgcaaattagcacccaccagagaaaggatttgaggctgggaatcatctaagttataggagagaaaaacagagtgcaagctgtacatgtcactcccagcttggtactcttttggcttcctgtcttcaagctgttggtgcctggtgccaactacacagacaagagtttttatagagagaagaggtgtgcatttggaatcctataaaaatgggtcctgaaaagtttatcttgaaaacttcaagaagcaagtatgtgttttctgaacctacagaacatcatggccaaggaggcttttgagcatgcagctaagttttagaattcctgagtcccaaacagacaaggagagctgtccattttcattaactccaaataaaagcttgaattcagcctgaagccctttgccttaatcttccttgcagctctccaacttacagccttgagaagtaacaggcactgaaggcggcttgcatttcagtgcataattgctctcaacaactgtgttgtgggtttttcttctccttctgcaaagatgaaagatgcctaatcaatgggcatcctcatgaggaggagggaacagagtagaacaaaagtgtccagggtggaggcaaatctgtggatgagagcccatctagagcgccttgctggcgctttatctggggcctgaaggcactgattctggcagcctgcagtgtgtacctgtgggcagggcaccatttaagtgcatgataaaatcagctaatgccttcatcaaactatgtctttgcttctaggcttgaggatattatcatgactccatttgcgttctaggtagcaaagggaaaacccaaaactgggcataattttaagaaaattgtcttattacttaggataattcacagatggagagttgaaattcagagcttgaattatcacttcttcatatgcgttaaagaagtctgaaattgactataagcttattctatccacattttattttgtccggtgatcacaggataacaaaatatctggttgactcttcttttttttttgtttccaaatgctcttattcatagggggagcttgtctttaaagaaccagacattccaacttggctaaatttaccaaatgttatgatgttatccttcatttacttattccacatttttatagtgttccaaatttctagccaccatcataggatagagaaaagcaaatcaaaatgtttcttactagtggggagctcacagtaggatggtagagggacagaaataaagtgctaagataaaaggcaggaggggtcagcccccaccctggatggctggctgggtgacagtgctctttgaatcctccttgagggttgaggagcaaaggaggccatttgtggagatggattgaaggagcagcctgagcagatgtgcacaaaagcaaaggagtgatggatattaaaggaagagttggccctccaatttgcctggttccagaccaatccaacatctgaaaatcttcagagaacatataatattgaattcaaaataatacatttcagcaaattttagaaattgaggaaagtaataaaatcattgaatttcctattaccaaagagctgatactaacccactgtgaggagcacaagaacttggaattgccttctttttcatgataatggacacacgtggatagatcagcagcatacctcatgtaatgaaaagaatgtgtgacttctattcagtgtgccacattccaggcctgactttgccacttgattagctgggcaattcacttaaaatccccaatttaaaaaaagtgcattgaagtatacatttaagtatgttatatatcttaatatgtgacatataaagtatataaaaatatatgcacatataatatagacagagttgccaaaagacaaaatcacaacaaatttaaagatcttaactgccttttatttgtgattctagaatcaggcaccacctcattctctaaaatagaatgggtgctttgatgagctgagcagaggagggtggctttatagacagaaaagggctaaggagaacagaactggaacaaaaagcagattgattgtttcaaaatgactttcctagtaaaggttaaagcaaaggggactttcttatcatgctagctaaaactgccctgttttatatctcaaaaaaaaatatatataaatatatataaattatattttaaatttatatatataaatatatataaattatattttaaatttttatatattaaatatgttttaatgtataatattaaaatatatatatttaaaatatatatatatcttgatttcttggaaggtcagataaacaacttagtgttggcttggtggcatggaacttaacatgagtgactccattttggtttgatcttttgggcctggtgcaggaactcagtccaaaccagtgactttctgcaaattgtatttaacacactaaaatgtatttgaagcattataaacatctaagttaagattatcggccgggcgcggtggctcacgcctgtaatcccagcactttgggaggccgaggcgggcggatcacgaggtcaggagatcgagaccatcctggctaacacggtgaaaccccgtctctactaaaaatacaaaaaattagccgggcgtggtagcgggcgcctgtagtcccagctactcgggaggctgaggcaggagaatggcgtgaacccgggaggcggagcttgcagtgagccgagatcgcgccactgcactccagcctgggcgacagagctagactccgtctcaaaaaaaaaaaaaaaagattatctccacccacaatttctctactaatctctgttcatgccatttcaatttgtttcagctgtgtccatatatttcagactgacagcaattacagatatgactataggagtgagtggagtgaccctggttgggcctatgaggataaaatgcccattcttccttaactgttaccacacactgtgctgaacaatgatttctgtgaaggcattaagaatcttatacaggtccaaggatgaatagaacaagaaagaaaaatagtatctgtatgatcttgctagaggcaggcatggggttggctaaaagtggttatggagcccatgaaagaatttcatgtgctctcagaaataaatctagtttaaagagtttgactcttgaagaaataagcaatttaaaaatgcactgagatgttaatattaggaaagattaggtaaacagtgcagggaactctctatatatttctttgcaccttcctatgaatttataattatttcagaataagaagctaaaaaatctttaatgcactgaaaattgagaatttacattttcaataattagaaataagcgttaaatgaatcatgcacaagtgaacagactctgttagaagcatatacaacagatatgccatcaaggtattttttaagattgtttttaatggcctcagagtctctaataattatcccagcaggatgatttttaccatgttataaacacatgacccccaaagcattccctgatccatacgctgataggttgtttggagctgttgtgtttgggtgtcattcttttggagcaagatgtcattttagacttggcatgtggcatatggggatatggctagaaagtagataaggtaaacaacctagcatgtaatatttatctaattatgaacagctttatatatttcccctttcatctcaaatatttaggactgattcagtgagcacaatgtacacatttttttctaatacttgtttgtgaataaaaattaattaaaacaaatatgtgtttcatgctggaattaaataattaaagttcagtctgtgcacagttctgccaaaacaaacatacaaataaataaatactttctgtgtatctacttattcatttaaatattaagatgcccagagaattttgggtctgctcctgcctttattatacagcaaataaagataaaaacagaaaagaacaattttgtaaacataagcatacctcaaaaacaaagaacataaaaaatccaaactgtatttctaatgaattttgaaaatgacatttttataaacatcagggtaaaatttgagcatctcaacataatccaccttgagcatttcagtgataggtaaaaatgtgagggataggatacattgctgtctgggatattcacttgagtccttttcactgagcagtactacctgaaacatgctagaagctcattgtagatggtttattttttaaatgaggtgttcttaatcactcatttctactcccactcagcatgcacttatgaatggacagaggtcctatcctattgaatcagagacagagatcagagtgaacaaagaacctatatggcacacgaggaaggaattcttagactggagaagaaaagcccagcaaagaaatcgttatcttttgatactgaaagagctgtcacagaagaaagattgtttgcaaagttgttctgttttattctgaaatgtgaatgggaatataggtataaatcgcttttgaaattacagagaccaaatttttgtctcagtgtgaagaagtttgtgttagctaaaactgcccagtaaatggtgaggatcctatcacctgatttggaacagagtctgggttctgggtcagagatgttgtggaagggatgctttcattaggagaattgtatctagtgttctttgaggtctcttccaggtctgagggaggctaatgaatcgcttcattgatataaactagcctactgctgaatcagtgtcatggacatacacttattgagtgcctactatatgtcaggcagccagaaactctgccattatagaacccactatgaacagatagatggaaggagacccctttctggggatgaatactccaggactgtgttgggtaatgggttatgaatatgtcacagacatttatattctgcctatctttataaataaaaacagactctctttgaagagagtcagtaatgctttttaaaaatatttatattctacaaagatataccaagatgtaccaaaaagtatctttttatgatttctacattcggtatggaaaacatgagtaagaaagtaaaatattaattaaataatgtttgcttagtaatgacacttctctatcagaggggaaaaatgtctttggatatgatactgtatctgggttttgtataaatattgattaaatagacaatatggtttttgttaacaactggtcttgagtctgacaaactaaagtttgagaagagaattttatatttactggatgagtgatcactggcaagttgcttaacctatatctgtttctttatctgtcaaatggggataaatacagtaactgcctcatgagtgcttacagtaataaatatttgttgaatgaatgagggattttaaagaattaatgaagactgaatttattgtacctgtcaaaataccaggtgcacaatgattaaatagtgatgtgtgtgaaagtcatgatagtgatgatagtggttgtaatactgtctctgtttggagatgatatgatcatctatgtacaaaactatggaatttataaaaaattggttagaagactaaaccaggaagaagttgaatccctgaatagacaaataacaagttctgaaattgaggcagtaattaatagcctaccaacccaaaaaagcccaggatcagacagattcacagtcaaattctaccaaaggtacaaagagaagctggtaccattccttctgaaattattccaaacaatagaaaaagagggactcttccctaactcatgttatgaggccagcataatcctgataccaaaacctggcagagacacaacaaaaaaagaaaatttcaggccaatatccctgatgaacatcaatgtgaaaatcctcaataaaatactggcaaactgaatccagcagcacatcaaaaagtgtatccaccatgatcaagtcggcttcatccctgggatgcaaggctggttcaacatatgcaaatcaataaacataagccatcacataaacagaacctacgacaaaaaccacatggttatctcaatagatgcagaaaaggccttcaataaaattaaacaccccttcatactaaaaacacccaataaactaggtattgagggaacatatctcaaaataataagagctatttatgacaagcccatagccaatatcatactgaatgggcaaaagctagaagcattccctttgaaaacccacacaagacaaggatgccctctctcaccactcctattcaacatagtattggaagttctggccagagcaatcaggcaaaagaaagaagtaaaggatattcaaataggaagagaggaagtcaaattgtctctgtttgcaaatgacatgattgtatatttagaaaaccccgtcgtctcagccccaaatttccttaagctgataagcaacttcagcaaagtctcaggatacaaagccaatgtgcaaaaatcacaagcattcctatacaccaatagtagacaaacagagagccaaatcatgagtgaacattcattcacaattactacaaagagaataaaatacacaactgacaagggatgtgaaggccctcttcaaggagaagtacacaccactgcccaaggaaataagagaggatacaaacaaatggaaaaacattccatgctcatggataggaagaataaatatcgtgaaaacggccatactgcccaaagaaatttatagattcaatgctatccccatcaagctaccattgactttcttcaaagaattggaaaaaactactttaaatttcatatggaaccaaaagagagcccatatagccaagacaaccctaagcaaaaagaacaaagctggaggcatcacgctacctgacttcaaactatactacaaggctacagtaaccaaaacagcatggtactgataccaaaacaaatatatagaccaaagggacagaacagaggccccagaaataaccacacatttacaaccatctgatctttgataaaccagacaaaaacaagtcatagattccctatgtaataaatggtgttgggaaaactggctagccatatgcagaaaactgaaactggacccctttcttacatcttgtacaaaaattaactcaagatgaattaaagatttaaatataagacctaaaaccataaaaaccctagaagaaaacctaggcaataccattcaggacataggcatgggcaaagacttcatgactaaaacaccaaaaacagtggcaacaaaagccaaaattgacaaatgggatctaattaaactaaagagcttctgcacagcaaaagaaactgtcgtcagagtgaacaggcaacctatagaatgggagaaactttttgccatctatccatctgacaaagagctaatatccagaatctacaaggaacttaaatttacaaggaaaaaaacaaacagccccatcaaaaagtgggtgaaggatatgaacagacacttctcaaaagaagacatttatatggcaaacaaacatatgaaaacaagctcatcatcactggtcattagagaaatgcaaattaaaaccacaatgagatacagtctcacaccagttagaatgacaatcattaaaaagtcaggaaataacagatgctggagaggatatggagaaataggagtgcttttacactgttggtgggagtgtaaattagttcaaccattgtggaagacagtgtggtgattcctcaaggttctagatccagtgagccaaataatgctagaaatattactaagaaatttactagacatatacattttacccagcaatcccattactgtgtatatacccaaaggattataaataattctggtataaatactcatgcacacgtatgtttactgcagcactattcacaatagcaaagatttgcaaccaacccaaatgcccatcaatgatagactggttaaagaacgtgtgacacatatacaccatggaatactatgcagccataaaaaggatgagttcctgtcttttgcagagataggatgaagctggaaaccatcattctcagcaaactaacacagaacagaaaaccagaccctgcacgttctcactcataagtgggaattgaacaatgagaacacatggacacagggagggtaacatcacacaccagggcctgtcaaggagtggggggctaggggagagatagcattaggtgaaatacctaatgtagatgacaggttaatgggtgcagcaaatcaccatggcacatgtatacctatgtaacaaacctgcacgttttgcacatgtatcccagaacttaaagtataacaataaaaaaaaaaattggttagaactaataagtaagtttaacaatgttgtaggatacaagattaacatacaaaaatcaacagtaacttatatactaaaattaaacaattgacattaaaataaaaataatgcattttataatatgtcaaaaacatgaaatgtttagggataaatttgacaaaagatatgtaagctttgtataccgaaactataaagcattccttagagaaatgaaagaagacaaatacataaagataaataccatttttatggatcagtagactcaaagctgtcaagatgccagttcttaccaaattgatttataggttaaatctaattccaatcaaaatcctagtgggtttcctaagtgtcttatggattttaaagatgattctataatttatatagaaatgcaaatcacctgggttagcctaaacaattgtgaaaagagcaaagttggaagacttacacttcctgatttcaagatttataaagctacattaatcaagacaatgtgatattggcataaaggtagtcaaacagattaatgggacagaatggagagtccagaaatagacccatacatgtagcaattgatttttgacacaggtgcaaaggcagttcagtggaaaaagaagagtcttttcaacacatggggctggaacaatgaacatctacatacaaaaaataaacttagatctatatctttcaccataaagaaaactcaaaatggatcatagatataaatacaacacctaagactattagaccagaagaaaacacaggacaaaatttttatgactttggattaggcaaggatttctaagatacaataccaaaacatgacctataaaagaaaaattgataaattgtatatgaaaatataagatttttaccttcaaacattactattataagagtgaaaagccacagactgggggggaagttagcaaatcacttatctgataaagactcttatccagaatatataaagaactcttgaaattcaagaaaacaacccaaatttaaaaataggcaaaacatttgaacacttaacctacgataacttctttatcttagagaagatattcaggtgaaaaataagcacttttaaagatgcttaacatcataaagatgcaaatgaaaacttcaatgagataccattgtatacccattagaatatctacatttgagacactgaccatgccaagtcagccacaagtggggatgtggagcaactggaaccctccacattcactgccagtgggaatgtgaaatggtgcaaatatatgtctatcctatgatatagtcattcttacccctaagttattattcaagagtaatggaagtattcttccatataaaacttttagatgcatgttcttagcagctttatttgtaatggttaaaaactgaaagcaactcaaatattcaccaattggtcagtggttaaaaaaataatgctgtaccgacacaatggaatattactaagaaatgaaaaggaattaactattgttatacacaaaataacatggatcaatctcaaaataattactgtgagtgaacgaaaacagaaaaacagtacagactatattatttaagttctataaaattctagaaaatacaaagttatttataatgacagaaaggtaatctgtggttacctgggggtagaaagagttgagagtaagggattgaaaatgagaaagaggctactttggaggatgatggatatgtttgttgttttgattgtggtgatggtttcatgaaaatcaaaacttaccaattgtttgttttagacatggacaggttattgtattccaaatacctcaatttttaaaaaaagtaataaagaatgcattgtggttgtcacaatgttaagggccctcaagatgtgattttggcattccttggtcaatcttaaaagtgagatttgattgataaaagaggtaatgtggatttacattcttagctgtgactatgttgactatcattagctataagaggataggtatgcagaaatgctatcactggacatcagtggtgttagcatgattaatattgagtcttggatgaaactcagtaattaacacatttcagactcagtccttttaaaatttgtcctcaaatttttggatcataaaattgacatctgaacattgtgttccaagatactcattcacacttctagttacttggtaaatatagccatatacatcttttattttaacaggagagaattctaatttttaaggaaaatgtctgatccttcattaagagtaaaataaggtaaaatcccacccttgtattttgatttgtattagtgaaggcatttcatctaaggacttctcaaaatcctttaatgtccaaaggctgtgatataccatcttcctgtttgacaagtggaagaaaataatttagtgacttccaggaatcgcaaagcaattttgtgactgcaaatctctatatgaaagtgctttggtgtgtgtgtgtgtgcgtgcacacacacatacgtggaaatgtaggcatggcaggtagtcaggcaaggtgacaaataaaactgaaaaacttccttgattttattgcttattgaattatgttctctttttagtgaccttactttgatgttccccaaaaaggccagatactttcacacacaaaaaaattatgtaatgggcaaatcacaaagactgtgagaatggcacatgaccagagaagaaaaaacatctggcatgacaattcatccccaacttcttacctttcaagattatcccctgctttagggtgtgattaccatttagaatgcctatggtattgcttttggttcacatagatttaacacgtactcagcatgtgctatgccacacacgcattttgccaaacttttggtgtacatttaatgattaccacaacactgagagatgggtatgaaaacaagattcgcttgggttgaacatcttctctatggtcaattgggtagaaagtgaaggattccagatttgaaactgggttattcaaggcagacagtctagggttcttctacatttagctgtggagccttgggcaagttaccaacatggtgtccttatctttaagagataattataaagtttatattatagagaatttgaattacagatctcacagcacattatggatcctcagtaaatgctatttcccctgcctcccatccccttctggttctagagtctttggtcttcctagtatatcggtctaaaccagattagcccttctggctgttgggtatgcatttatcccctcagtacagatctccttaataaagatctgtgttctccaaaggactgggagtcttttgaggacagagaccctctcattatctctgttcctccaatggcagcacagggtccagtggatgcctgtaaactgaatggacaggtctcatggcagtgaagaggtgccttgcagagactgcagaacatttattttgtgttacattacctgtatccctcaccccagctcacacctttctactcttagtttccatcccagagacagcttagttccctgtcacttgtctgttctatgacttgcagagctccagcctacctgggtggcacctcatggcactgactgctatgagagttccacaaaactgtccatggtgtctgtgatgtgctggtgtcctgtactcacagatgtgctcacacctgttcaggtatccaaccctcagagccctccttctctggttcttaatgtcatattgacaattgactctgtctgagagaccaaaatagatggtcctttatcaactaagatgaatcctaaggttaaaaaacagagtagcttctgggttgacggttcagggcccagctggcatggcagatttctaaattcctacaggaaaaaccacactcctactagactctctaacaataagtgctaccaggcaaattgtcctaactttgatttacaacccagaccactaaaactctggttggacagaggatttgtctcacaaacattactttctgataagctactgcagacctaagccagtatcagctggcttatgaagcctgtgcacaaactgtctttgtgtcctatagttcatcttttgatgtaaagagccaaattccacctcattttaatgctaaaatcctgccccaaagtgaacatagaatgtatgttgcatgtatgtttgcccactgcgaatatggtcttctcataaatatgtatgatgtttctcccaaatctgctgaatatgtatgactgcattgtgtgctatgggccctatgaggcataaaaccaacctggccttcccctcttggaaaagagagcaccttcggcacacactggacaacatctcttcccagtttgcaaaccgatattggctgccaataaagttctcctttccactatttagtcatcctggtggtcttatagatggcagtgtcaacccagtttataaagctgtctttattcattcaatcagtgaacacacatcactgcgtttataatagcttttgttgttgttgttgcttttacttctcattttcttcctattctattgtctagtacctattcctctaatgacagattggcatttctcttctaactaccagatatcagccatattctataggaacccattgttttacatatttccatttagattatttgagattaacttttgtcccatggcctaccactatgcagagttctttggtgaataacatagcagctgaaatttcaacatcaatccggttatcaccctttaaatattttatctgtcttgagtttgaggaaattttgagtattccagcctaactgtttctggacagatgccctcctctctccccgttgctgtacttggcagtttgcttatgcagggtctataggctaagttatatgcctaatttagacaaaagtttaacaggaatacagaggatagagaattcagggcagaactggagaactgtttcttgactcttttcacaatgtcttttatagtataaggatttacatgaatttcacgctttctatgagcctcctgactacttttacagtttttatacactgagcccagagttttcccatcacgatgggctcatgatcctgtccctgtggtaagtttctgcagcctagtgattgggtaagtgttgtaaagatagacaagagcactgtgttttctctggctttttaggcagacatctgatttcctggttggcacttgtttcaaccatgaaatgggaaagactgggcattttgtgctcctaatttaaaatgattgtccatgagcatctctcaaagtggctcagagtttattagggccctctgtagagttcttaagggggatggaactcgtttggaacgtgtttatatgacctcttctctgattatgttggaatagctgtgacatttcattttcggggaaaaagtaagaaggagggttacacctttgcaggcaaaatattttccactctaacaggcaaaaaaagaatatttgaaaggtttttcttctttctgtaaatgaacagataaaataatttaccctaggagagcttttcattgcataagaagtcaattcaatatcaggtcaaatggagatattgacctgatactatactgatttcccatgaaacatgggaagtgctttgacccctggcccaacctcttctcattcctctatatcatctattctgtgtgtgtgcatctgagctcaggtttgtttgagagatatctatctccaaaattcaaataaagtatttgtaaatgtaattatactctataaacagtagaagaactatttaatctggtcctgctgaaaatcattttcttatgtaaagagtgacatcttaatttaaccttatgttatggatttgggtgtttttcatatgccaagattatttagtgtagtcctttggaatttgagattatttatttaatgtcttccctttctctgtgacagtaacacttctcttttttgtctcaggggtcatcactgccgcagacattcttgatcgggagacaatggggtcatactggctaacagtgtatgccacagacaggggcgttgttccactctactccaccattgaggtctacattgaagttgaagatgtgaatgacaatgccccgctgacctcagaacctatatattatcctgttgtcatggaaaactctccaaaggacgtatctgtcattcagatccaggctgaagatcctgactccagttccaatgaaaaactgacatacaggattacaagtggaaatcctcagaatttttttgccatcaatatcaaaacaggtaagggaatgcttatatgacttctttttagtttgtagtccagcctttaaattcatcagcctgacactttctgtactcatttactttattttctaaagaatagcatcttcctttctgagaatggtttctgaaaaggtgagtgccacttctgcctatgtggtatgttttaatttcacttgacactgagtgggagtgatctaatcaaaatcagaggttttcacaaaaggccttagatttgctttactcataataataaaatgtggttcccaggccactcagagagccagctgcttccttctctttcttgaaaagagtaacctggcctctgctggattctatgagcaagctggctttgtgatgcctctacctctagacacttctcccttgctgatctccttaaagccttcacctcaaactccagatgtttttgcgattcctgtactacccatcaaggaagcatccatgtttaaaagaacttccagtgtctcaatttttacataaaatatgtataacttcaattttctggtcttttgctcaaaacgtttttagagattgtaatgaaaacttaattggttgagtaagggtaagaaaggtctaaggatcgggagcaggtgtgcatttggctgaatgcattctgagacaggtatgtacgttggaaaagttttttgcagatctgagaggttcattgctttcttgtgatttgcctcttttaggtctgaacaaaggagtaaaatagtgagagttgtgatggatggggttttaattctttgaaatttagaataatttaaattaatttcaccctgggcaagtgagttgatattggttcaaaaagttaggcttagttgagatttgttggtgtgaacaaactcagctctcctaatgaactactaatctagttgatggtcgtttctcctgcctatgtttgttaaacagaaacatgtagctgacctcaagtattttataaatgtcagactcccattaatataatgaaagagaatgtcagggtttaagaaagaaaattattgattttctctaattatgagtggatcaatcattttgttaagcagacttttgcattctaacagtgttgaatcgggatttgacttgtattttattgtaagacaaagagagtagtaattatcagtatctgttgaggcctgcttgtacttgcagaagagggctcagatttggagccttggcccaacctttcagagccccattaagtagataaaattctccatgcttctgcggaacaggcctccaactttcctgggaagccctcctgatttactttttggtatggcaaagagctccttagaacatagccacagagaaatgaattcaatcactttgcaaatttaagagtgagggttgtggtggagggagagagagaacaaaaacaaaaacaaacaatgtcacagtaaagaagttgaggccacaggtatcttcacatttcacaacccagtggagcctgaaataccccagtcagattctgcttcttccatcttgatcccattgctacttgagtcattaatggtaggcccagcaccctttttttaaagaatttaataaaaagctgcaaaagggaagttttctctgttctcatcctttacttaggaatgaatagaaaaaataactgtcacagggaagagggaagaatttgggttggatgtgaagttcagagaagaacatgctcattcatgtaactaaagctttcttttatatggcttttaaaagtttgaacataatttttcagaaagccctgttttatcactatttggcctacgttgctaataagatccttaagcatgttcataatttctctcttcttgccatagatttttaaaaagcatttttgccaggaatgacatttttgtccaactgatctaattgtctaaagaaatatatagcataccttgtagtttccagacacatgataagaaaatactgcttttttatccatttattcaatcaccaaccacttattgtacctattacttttcaagtaagatctaataaagagggttataaacttaagatatggtcccagccttagggacccaaacttatatgaacttaacaaatacttatgatatagctaaagatataaatgattccagcaggggagcttcactcaatatagggttggtgggagtgatggtcagggagggcttcatggaggaagtcacatttggagttagaagtcctgagtttcaaatgcttgctctgtgctttctaactacgaaacaccatagaacacagtgggggaaacagactgtattgcacagttttcaccagcttcatgaacttaccagcttcatgaccttggggaaattattgaacctctcttaaatgtagtttttagtgagtaaaaatagttgcaaggaatataggagtcctcaccagaaatcctttgcacagtgcctggtgcattgaaatcccacaaaaaaagctgataccccattctaactactttactgtagttacagtcatttaatctctttggacctcacttacttatctggaaaatgaaaatgaccttgcttactctgcaagggttgctcatgaagtctgaatgtcatcatgatgtgtttgaaggctgttggtaaactacagagttctgtaagagtcatgttatgcctatttctaatgagattcacagaactccaagtctggtgaaattcttgttaatggtgttgctctaagtatcatgctgcctagggggcaaccttcagccagctcaaggaactctctaatagaagtcttaatttttggcatttcttcctgactctaaagtcatttgtctgaaatagttacatcaatataacatttttcagtaatgaagctggatgtgtagctaaccagtgtgtagatagatagatagatacatagatagatacatagatacatagacagaggcatactaaccagtatatttaggaaagatttatgctttagatttttttctcaaatggatgttgactctagtaaactaagctttcatttcctcctctgctgtacagttggaatttttagaatttggttttgttttggcaatgtgctacataataaagattaaaatgattaacgccaacgcaaataatgccaagatgtatgatatacagcttgtagcagataacagatgttcccaaccccaaaatggagagagatttctttatcgaacatctgttctctacacaaataactgggtttttttctaccacatctagaatcacgtagaatcagtagtctgtggactttctttagtaattcctgtggcttaaggaaaacaaaagctgtaatgctgtgtggttttttctggccggtacagagaactcttgcttaattccaggccaagcagttaaattcaatcaaatgcagcctacccccatgtctgaggtggagataccatcaggccggtgttcacttgcctctttgggtgagcaggaatgttgcttccttccagttcgctcagtcgcccaggctggagtgcattggcacgatctcggctcactgcaagctccgcctcccgagttcacgccattctcctgcctcagcctcccgagtagctgggactacaggcgcctgccaccacacccggctaattttttgtatttttagtagaaacggggtttcatcgtgttagccaggatggtctcgatttcctgacctcatgatccgcccgccttggcctcccaaagtgctggattacaggcgtgagccaccgtgcccggcctccagttcttttgagggagtccagggtggccctcattggtcatccaggctgaagtggggagcaggggtggaaatttcttctagggctttggaaggtttattttagtcatgtttacaccatggaaaccccatagtacagggctgacatgccagtgtttagtagagaactcaataaatgttaactattacgatcatcatcatcatcccgtatttccccctagaaaaaaagtctgtgtaagctacaagcacactgctcctggaccccactatcttgaggaagacatttctgaaaggcagccatgtcttgccttagcaattgctaggtagcactgaaatcttcaactcagttttatgaagtgcatgacgtaccgttgatctagaccccaggtgtcagcagggtgggagacataacagaaatacattggaagatactttctgcactcagggaatttagtctcataggaaaaacagaaccatcatacttaccatttaaggcagcttatttaaaacaaaaacaaaacaaaacaaaaaaagagtggagctttgtggattataagctatgaacagtgtaacatgtcagagcagagctgagtaacaggggatctttgcggacctgaagggggcctgaagaatgggctgacctgcagagacagaggccagataactatacagggaatataaacaagtgaagcttaccagatagcttgagaggcatgatattattagaaagcgaattttaagagtcataaatgtcaggaaagtggtaagatattagaagtagcaaatacatacatctcttttcatttgtttctgagtttgataatagttaaattttaaagggccttgttttttttgttttgttttttttgtttgtttgttttttccaatcttccttctgagagacctacttcttaaaggaattattttaaagggaaaaacacatacataaaagagaccccttcattctttcttttgtgtctgtaaaacatagatccaggattagcatatgctgcattgagagtctgcctgtgaaagtgatttttgcttaatccagatctttcaatggttcactgtccagggcatggaatttctaagtttatttctgcagttgctctgtctccctttgacccatgctccattcactggcatctccacttgtatttgagtagaggtgaagttcagctttcttttgctttctgtgagcatcttgaaataaacctgagtaaaacatagtttatgtgttggtagactggctacccccactttaggcgacttaggaggaagaaatcctcttcaaaagtgtgtgtgctgtaagaatacctcaaattctacctttaagtattgattactcctaggatagacatttcctttctctattaaaattggaggagatagcttattaaaatattggatgtctttagttttttaatcagctgcatataacatcagcatgccttttggtatatggtatacaacatagtggataagagagggggtaacagggagagaaatccagaccacacttcaacctgaaaattattacctggtgagcttgctagactatagagtcttaggccagagcttgattatttgcatttttaacaagtttctaggtgatgatgatgttgctctctcctgagagcctgattagcaaggttctatatgaaacaaatgagggaggtaacaaggtgcccagagacacctgaggacaagacagcaaactttatgagttaccccaacatcttacggggctgaggtttgagagttaattcagtcacccactcccaaaatcaactcccatatccttacttatactttctcttttatcaagtggagaaaaatgaaaatcctgtctctaactatccatgagcaaaatatcacatggattcctaagacttgtagttaataaaaaacctgggtcacgtaatgtttggatacacttgtattatttccaaataggtagaatcaagcagaatttgttattaagtggagttcagacctactttaatgaatcaacaaacattattgtattttaatatatgattataaaaaagtgttagttcataagatatggatgttcaaaaataatttgttatcttaggtaagttaagccttgtgtttatgcacagttccatgtggtggtaatctgcttagaaaaccaccttttctaggaaaagaggaggaaaccttactttatttacaaatatagggatttaaagaaaaaaaaaaaggtgaggtacaagggtccaaatattggtgcttgtttttcagtgaacattgcggaaatctattgttgttttttgttctttgtttctttcgggatggcagagcccctcctaataaaaagctaaattctcctgaatgggtagaaatggctgccggatgatgagttgatattcataactacaggcacaaggcagataatgtagcgaatgagtatgtgtgaaactgtaaatcacccttgctccttctttcagccatgaaaggagcccttgtcctatagaacattaaattgtgttcatttaatccaacaagtccagtagaacaaatcgggcttatgcagatttatcacgggggttatttaaattcagcggtgacctttgcatccacgtgaatgtgctccacatgaacaaggacaaagggaacttttctgcattgtcattatgtccccagggaagctgtgcagttccccacttgatcagctcacaactgtgggttgagggtgggggtcatggggttccaaggatgtggagggctgggtcagggtgggccatcaggcatgggagagtgtggtgtattatatagcataagaaaaatgatgctcttgccctggctgggaccttatcctgggcagaggcagctcagaggtacttcctggaactacagttcattctgggggaataatcgtgttgctctgtgttccatgctgcttcatgtcttgctaacccactgagaacaggtagcgatggtgtggtattcccagataaccagccttcctctggggctcagctgcattgtgtagctgctgttggaaattaagtccagagtgtggactcgctctgccttcatatagcttcattttttttttcatatacttattgtgaatgtaagtaccaacttcagagtttctcaacctcgatactgtggatgtttttggtcacataattcttcgtcgtggggagctgttctatatgttatataagatgttcagcagtatccctggcctctgctagatgccagggtcaccccttgcttcagttgtgacaaccaaaatatcaccagacattatcatacattctagggatgggaggaactgcccccattgagaaccattgcactaacgtggaatactttacagaaccccattccatatggcccctagcaaagcaccctgtgcaaaatgaaatgactgacaattgagatgtgatggcatataactataactattatatgtaatacgtgtgtatgtatgtgtacatatatatgtacacataaatattattaataataaaatgaaatacctagagggaaggaatgttacacaaagaggccttgctaagtttctcccagtttattaccattaggatgtaccctctttgtccagtcatacttctacacaactgaccattcttcatcaaacctaaacacaaaaatacacagttttcccttggctttgggttttcttttctgaagaatcttctgtcttatgtaacttcagttaaatacatttgtatgtttttctattgttaacccgccttttgttacaagtttttaaaaatttaaaagagaagaaatccaaagctgcctctcacttccctctgactccaggttctttgtattttaaaggctctatgaatacttgaaatagaatccattagagaaaaaataataataataacaaaacttcaaacagaatacatgtgaattaagttatcattttctcaactcttaatatttggagaggatttggctggtaacgaaattctcctcagagcccattttgaacagccttctccagaaaacatcatgaagggattaatttcagagtttcagggtttcttcccttgaaatgcttaagcagctccaaatcctgttcctgcttaatgccagccttctgacggatcaatatgtggattgtttcatcattggaatgaaacaatccacattagatgaatcctagatgaaaaggggggaagaaaaatccttgtgacctcaggtagggattctgcagtcatgtatctagattaaggctctctgaggtgttggcatccatattaagtattcagtgcccatttacaagccccagggaactgcagatgcatagggacttagaccagtgtcccagaccactatctgtttgttttttaagagacagagtctcccgctgttgcccaggctggagtgcagtagcatgatcatagcttactacagcttcaaactcctggactcaagcaattctcttagcctcccaagtagctgggactacaggtatgtaccaccgtatccagttattattattattattttagaaatggggtctcactctgttgcccaggctattattgaactcctggcttcaagcaatcctcccatcttcccatgtgctgggattgcaggcataagccactacacatagcccctgagccacgtgctggatccccatcttccagtacgtcataggattttgaagccttgggctaagtgcgaactagtgccaccatccatgataggaagtaatttgactccccaattaagttagattccaatggacagggcaacagcatgtgttttaccccatttatgagaagcagatttggatcttcgagttaacaggattgttacttggaaaatgattgctcgatgctgtttctttataaaactgaattacaggcagggatagggagctttaataaaaggaagagaggaatcagcagtcatgaactaaatgataagagcataagagaaatgatgctcttgacctggctgggaccttccccaacgcaggggcagctcacaggcacttccaagagctatagttcattctaggaggagaattgtgttgttccttgttccatgctgcttcatgtcctgctaacccactgagaaaaggtagtgatggaggtggtagttcctatagccagccttaccctggggctcagctgcatggtgtagctgctgttggaaattactgagaattatttgggagggtgatagagtcatgtaaatagagcagatgatggagctgtatttatgtgttaaaaaaaagagagattgattaaggtcataaatttctcttttatttcttctatctgggcattatttccacagcagtaatttactacattgctttattactttcttctgttctgtgggaaacagtgaattttaattgaaaccactgcccgcctctctccattcttggatgccattgttagggagactcctagatactgctgggctgtgtgtcccttgtctatcaagtatgaagggatggtggaaagaggagccttaacccagagcacaggtctactcactgtctcgagccatgccaacatgttcatgtattagctcattcagcaataaccacagtcctggggggggaggggaacaaaactctgggctctgggcacaaaagtggtttgaccagggtcacccagctggtcagtgccgagctaggattggtctgattgatggacttaatgctaaaaataaatgctattgaatttgaaaaacatgagcaaactaaataaataattaatgatcctagaactttgtggggaaagtctttcagatgattaagcacacattctttgttttataggtgtgttaggggttgaattgttccccaaaaagacacacaactcccagcccacacttgtgaatgtgaccttatttggtaaggaagatctttgtagatgttaccaagttaaaataaattcatattggatgtgtgtgggccctaattcagtgactggtgtcctcataaacagagagaaatttggacacagagacacagacccagaaggaagacaacgtgcagagaaaaagtaacattttcgtcaccgaagacaagattcatgcctgaagtacctgtaacaaaaggcaggctaacaagagaaaaacatacaaatgtatttaactgaagccacataagacagaggagtcttcagaaatgaaaacccaaagccaagagaaaaccgtgttatttttacgtttaggtttgatgaaaaatggacagttgtgtagaagtatgcttggaccaagagcgtatatcctaatggtaataaggggcaatgtagcaaggcctctttgtgtagattcctcttggcatttttgtgtaacattccttccctctaggtataaggcaggacacctgtcacatgagggtctttaaaagaaataagagggtaaggtcagagatacctttatgcttctgtagttttctcagtttcctttagcttaaaatactccgtatgccaaggtgctgtacttgaggttattgtgttggaggccccaacaacagccctgagaagatggaagcagagactggagttagaagcagagattggagtgatggtgccacaagccaaggaattccaaggattgccagaagctaggaaaaaacagggaaggatgcttccctagggtcctgatagggaccatgaatctgccaacaacctgattgtgaactttcagccttcagaactctatgagaataaatatctgttcttttaagctacccagtttgtggtgcttggttacagcagccctaggaagctaacatgagtgcaattcagagaatagctgtgaaggtgaggttctcctaaaggagggaggaagaccccatggcagaatgaaggaccactgactcctagtgcagtactcttttcactagacaaaatggtaagaactttagcagtttttgaaccactcaagcttggttttagctagatagtttttttgtttgttgttgtagtacttatgatctagttgaatttaactatctgggttgttctaaaagggtagaagttggatgagagacttctaagtctctcattgtttctaagtcattgcattactatagtcatttcaagacttctgaaagataacccatggataacaccatcatttcttacaggagtgtttttacagaaggccatgaggtcacgtagaagttaatattgactggcattcagtgtgcttcataaatcaggatctcatcagtttaattcattttgtcatttctcagtcttttaaagcaattttctgaaagcacttttttaaaaaagcattgaagttgctatctgaatagtttctatagtttgaacagtagtttatccattgattgtgagaacttaaagtccagttttagtattgttaccactttatattctgatcttgtccttttttgtcatctttgagtgattttgttcttagcttcttgacgttcttataaaagtgtgtaagtgttttaaaaatccataaactttattaatattgaggtagattattctgggaaagcatatggaactttaacaataaaattataaaaccaacacatgttgagttattgatagcagtcctgttgctctgtagtagaaagacacatttgctttctactttgctgtacatagtcatagttaggcttcataataaccttgagagggaaagaagctagatggagtagtaatcatgagcttggacatgagaaataaatgtctttgcattttgatcccagcttcttggccatgtgatgttgggcaagtgacttctctgagcttcagtttactctgtgaagtgaataattatagcaactaatgaactggcttgctattaacattaaatgagttaagatatgtaaagtattttaaagggtattttgcatgtagtatactctcagtaaacgttcaatattatctgcatatggacggaatttgttttagctaattcaatgtccacattgtatgattaaggccttagacagttcgtcttttcaaattatgaagaacattttacctgggttcattacatttcatcttgtaagattgtgatcatctgttgatttctatatatgtggttctctaaattaagttgtgcctgataagtggactgtgatggggctaaacaaaggaccctctctcaaactcctagaaacctctctccttgtcttcaatatttcaacttcccaagagtaaaattatatgacaccttggaaagttcactggtagtcatagcttatccagattttagtccagaccctatcactattattaacagtggacaagtttacttcatttctataggccacagaatcctcacctataaatcaaggagtttgagcaacaataaaaccatcaatacctgctgtgtgtactgctacagcatttcctactcccacgtagacatcattaatcaattataatggcctttcatacatgctcatgctttgcatccatttcaacctaaccctgagcgggagctggttttgcgaaatgacatttatttgccattgagggccctgagaccgtctctatctctgacagtctttgagtctatatatgagaatggtattgaagtgaagggaaaaaggagactggtgggagagatgatagaaatgcagttaatcaggtcttggtgacttggagaagagctgaacatgagaggagaagacagtctcaagggtgtagtgaaaaggagcagcaggtttgaaacctcacagagaagataccttgctgtaaataactctggtgatatctgtataccccttagcagcctcctttcctgtgtgtactgacccccagtctttccctccttgtctcagccagttagattggggtagacactagttccaggattctctcttccaggaatttattattgggattcagagataatttctgggtgtggtggaattgtggagttataaacctgagaactgtagggtgcctatgtgcatgaagcaactgacagacagacagacaacagacaaactctgataggcattactgaaactcagctatgctccttgcatttaaattccctaatatacccttgtaataataatacgtaattttgctgtcaacgtttgaaatagatttccctttatttaagaaaaatatcttaacagactctaactggatccccagtcaggagagaggctcaggaaagaagagctattccctgatgtcagttgctgcacaattttgttaaagagtggaagaaggaagcctttaggttgggtaagtgggggagatatcagggaaagatatttatctttataagtcatgttattgctgggagttttcatcgatgctatttggatgttggccatcactttttatctttcatttgtgaaattttgtggatcaaaatctaaaatgtcatgatctccagcatgtatgtgaattaagccctgtctctctttattaatagttcttagatggatatttgctggtttaaatgttatctatagtgttctataaaaattgccaacaattctattaagtgtattattctattttagacaattctgcttatctttaacctgttgaacaagatctgcatgataaacacctgttttctcagaattttaccctgtgaaattcaccagtacacccacaagaaggatggaatcctctcagttggaagcccatttcattcacatactacccataaggcaatagccaagtttcttaacttggtatagctcaggttccctatcaagaaaatgggtatactaactgagatgctgaggaaattaggcgggctactgtattttataaagcacttagcttagccttgcacatacaaagtgctcaacaaatgttaactgttatagctattattaaatgcattgcttgtaaagaatcttttcttgaaaatcgatgaataatcaatctgattaaatgccttgaaagtctctgatatatactacatactcatgttttgtgagtgcctgctataaaccaggtacaatgctaggcacagggtgtacaaggatgaataaaacaaggactttacccctttaagacctcacagttcagaataatttcaccatgcactgacatttattgctactgccacacagctttaaaatgaagagattaagtaaataatattaaggttcttatgggacctttttttctggcaataatgaatggttataatatttattggttgttttaggaaggaaagcctctgagaacatgagtgaggagatgtaaaataaatccatcacattagaaacagactattaaaggcagaaaacgctcagcctctgccaatgaccatttttaaatgtgtggcctttgcagatacatcagttaaccaagacaaatccaattttacctcccaccacttaagtaaatttctcttctttgtaaaatttcctattttataaagacatgcttcatcttgactatgtacatactaaattgttcattttttactgagttaaattgttttctgtcatagtgagaaatgcattcttctgaagaaatgatattcatgcccgggaaatggggatatttattaaaatgttttattaggaaactagatttagacatatttctataattttcatatttaagtatttttattgcccaatgaaatgactttcagtttaaaatggactcagataatcagtctccaaattctcacttttatacttaatcaaatatagttggtggatttatatttgcctgcatatgtttagaaatattagagatgttttcagtagaactctatcaatcttttgctgggttgtaatagctagtaaatgacttaaattattttgtgctttcatccaactctgatttaataagcctttacggatttgggattgtgtacataggtgtgggaggaacacaaaaaacaggaaacttctcaggcctaaagaacgaacaggctgtttacaagacaaaagcacctcacagtaaaagaaaaacctgtgtgtaaatgtgaatttttggacttgttatttaagttgcctcttggaattttagtcatatctattatttccaaagtcagaagaattatctgtgcccagggttattccagataactgatgtttaacattttgagtggcatataacacacacaaaaaagattatatttctggaccactttttaaagtgtattaatgtgtctttcagttttcaaacataatcttttgaacaaagtgataaaagcagggctggcttcatgggcctgccatctatgtcatcgcatagggccctgtgcttagaagggccacatgcttggtgtccttctgtcactgtctggaaattcttcacaatttttgaacaaagggcttgacatttttattttgcgctgagccctgcaaatcatgtagcccatcatgcatacaaggttttcacttggactgttcattattgtctaggatatctagtgcagtaatatttgggtctcctcccttgagctcagcttgccagcatacacttctgttctcaggacgcctctttcttccagggctctgccttctaatttgctgcttctcatctgcggagccatcccataaataaggtattagaatagtaagtaggctgagaatcactaggctctgaagggtgaccttgaagactcctcccatagagtgaaagtacctccacgtcagtagccaagctttactgcatttatttccgggatcagaggctcctctcctggattgattgcactggtgaagtggccatctctgtataaacaccaggtgggaccacaccattctggcccacttttattaaaggaagattgttgtaaaaaagctattttaaaagcctacttttttggaaattaatcatagagggtaagaaagtaagtgaggcttcttttcatgagactcctgttggagaaatcttacaaattacgaatgtttcactattgaccatgacagatctcttggatttcagtaatttctgtgtcttcaagttgttcatataccttcaaagtagtgttcatgcaagttgttcatataccttcaaagtagtgttcatgcttggtgcccttgtgccttgagtcctaaagtgaactatggcatgtttttgttttgttttgttttgttttgttttgttttgttttttttgacacagatcccagttgctaagctttccatataattacagaactatgtttttcacaatctccagagaccactaccagctaaaggaaagtgggtggattctctgtgcaatgatttctagttttcttctggtgcatttttctagtttctaatattcaagctacaggaaaaggaaataaaaaggggaagcaaagccaactgttctgttgttattttaggccatccatagcataagaaatatattggcaattatgttacaagaaaataagatttacccaaatagagaaaagagtacttcttactcatttacttactcactcattcatttattcgctcaacattcagtgttatttattgaacacctactgtgtgctaggcactgtggtgtgtaccagggtgcaatgaaggataagaaaattattatccattccaaggatggaagcatgtgtgtactttatactcaacagatgctctaaggtaatacagaatgaatgaatgaataaataaatgaatacatgctttgaataatatgcatcactgatactgagcagggatttctcaactcatttttgtagcaaaagattcttatacctttctgaaattgaatgatggcagaaattctcctaactgcttttgtttaaactcctgtttgacatttgaactgttttcaaaatgtcatctctggattcacttgcctctgaggaattgaaggaaattttatattgacatagtctgcaagttgtcagaattcacatagtactagaaatttcataagtattcataaaagaaaattaagagatcattaatctctttttaaactggtttaccccacattctcaaagtgctttgggaattgcagtatcaagtttgtgccaggtcttaaacattaactgaaatggttaaagacttgggcatggttaacacagtgccatggtgccctcctacctctgtgaaactgtcattttattatgtttgattttaatgcgatttgatatgtggggggagaaagcaggtaattatttggaaaatgcccgttacttttataaataggagaaatacgggagttggtctttgctaatagaaatcataatagtaattgcagtcatgattattatatggtgcttcacactattaaaacactttatctatgataggtttagaatcacctgttttacatgatgaaagtctacctagggaaactacagaaaagttctctaaagttagaattttgtacctcagaatgaaaagcaacagacattataaccaactaaaatttcaacgaaaatgccaagaacacacaatggagaaaggacaccctcttaagtacatggcacttggaaaactgaatatccacatgcaaaagaatgaagctagacccctgtctctcaccatatacaaaaataaactcaggatggattaaagacttaaatgtaagacccaaaatgataaaaatactgaaagaaaacatagggaaaatgttcatggcattggtttgggcaaagaatttttggataagaccctaaaacacaggcaacaaaaacaaaactagacacattggattatgtcaaactaaaagcttctgcacagaaaaggagacaacagagtaaaaagaaaacttaaagaatgtgagaaaatatttgtaagctatgcatctaataaggggctaataaatagggtatattaggaactcaaataattcaacagcaaaaaaaaaagacatacataactctgattagaaaatggacaaaagacctgaaaagacatttctccaaagaagacatacgaatggccaacaggtatatgaaaaaatactcaacattacttatcatcagagaaatgcaaattgagatatcaccccaccccaattaaaatggctattatcaaaaagacaaaaataacaaatgctggcatggatgtggagaaaggggaactattatgcactgttgatgagaatataaattattatagccattatggaaaacagtatgaagattcctgaaaaaaaaataaagttaccatatgatccagctatcctactactggatagatatccaagagaaatgaaatcggtatattgaagagatatttacactctcatgtttaatgcagcacttttcacaatagccaagatatggaaccaacctaagtgtccatccgtgggtaaataggtaaagaaaatgtggtgtgtatacaaaaaggaataccattcagctgtaaaaaagaatgaaatcctgtcatttgcagcaacgtggatggacctggaggatattatgttaagtgaaataagccaggaacagaaagacaaataccgcatgatctcactcacatggtgaatctaaaaaagttgatcccatagaaatagagagtagaatagtggttgccagaggcttaggataatagaggaaaggagaggataggaagagattaatcaacatgtataaagttacacttagatagaagcaataagttctagtgttttattgcacattggggtgactttggttgccagtattgcattatatatttcaaaatagctagaagacaggattttgagtgttctcaccacacaaaaaaggtaagtatattatgtgatagatatgccaattgctcgattttatttttacacaatgtattcttgtatcaacacatcatactgttcccactaaataggtacaattaatgtatgtaagtttctttttaagcagcagagaaatctaggtgactaaaccacctgatgtagatcctttatttttgatggcagccaatcattgttttaatagttaaagggagaggagtggtggtaaaactagggctagatgtctgtaaaccttattataagcaaaatatttgtaaagctatgcaaatagtgcacatagtgcactgtatgccttatgggtttgatctgtaacatgaactcatcagaagtaagctaaattcaacactctccgacctttaatgagttgatgatattgttctgccttgatttgtatattaattatggatgaattaatttaacaaatggatatgaaaaacctactctatgtcaggcactgtgttaggccctggaagcacaaaatgagtaacacatcttccctcaagataggtaaggtctgtctgtcagagcacacttctgctgacttatgttctgtttttgcagtccttcatttcacttttattgatcactactgaacaatagtttcttaccctttatagctttaattttccctgcattctaggttatttgtcaagacagtaatgattgtaaaacaatacttctacgtactagggaagctattttgtgtgagatccctgtagtcagcccttgtgtagagaagaatctcaaattattggttctgttttggggcatatagtacccagttaaatattaaaatgtttaaatttctaaagtgatgttaactgggagaagctgatatcttttcagagatatatattgaagagagattgattaatggttacaaatatgcacttagatagaagaaataagacctggtgttcgatagattgtagggtaactatagttaacagtaatcaattgtacatttcaaaatagctagaagggaataagtcaaatgtttctagtataaagaaaagacaaatatttcaggtgatggatatcctaattacctttacttgattatatgaatgcttcaaattatctcatgtactctgaaaatatgtacatctaataagtatcaataaatataaataaacaaacagaagcaagtgttgaactaccagtttgttataactgccaatcaaatgtgccctgggacaaactgtgtctgccatcacctgccacccccattccaagtactaaattgcactataaaagcaggacttttaacagggtcagctgtagcatgggtgccccagagccctgcccccagtcaggaaagctctcaggattcacaaagactccagatgcttccagggttcagcattctcctctgggaacagggaaggtatcgccaaccgcttcagccctcagggagctcctggttgagagggaacagcctttcctatggttaggtgcaatcacaaagaagatactagtgctctaacaggttttgagacttatgtgtgccagaccctgtgctaaagtcttattgactcttcatagctgttggaggcatgtgttgataatgctcactgttttacagatgcttaaagaaatttggtgtctgtcaaagcctctaaggataggtcttatctgctgccttccttcctcctccgtgcaaccattcattacctctctgtcctcttgctcactcctctttgccctcctcatgtccccaagcactcaggcacactcttgccccaaggctgttgctgttcctgctgcctgaacctctcttcttcttgatgtccatgtaactggtcccctagttctcttcaaggccttcctcagtgtcacctctaacaagatcttccttggttacccaatccaacattgcaattctcatttcttcatgtgccccttccctgctttatttctttttatcgctcatcactatctaacaaggtatatatgtgacctatttattttgttgatcttttattttttcacagactggaagagccagggatacagagtttttgtccttttgttcaccattggatatagtttcttgaactgtgactagccaatagtaggtatttactaaatatttgttgaatgaataaatgaatgaatagctaaattagtgatagaataaatttgctagaattttctctctcaaagataacaagtaatgtggttcaaatgtatagtcagtctacaggctatgcattaatcttccaagccaagggccaggtagtcggtaagatttgcacttgctctttaaacatgataggtgttggtaaattgctcaagggtagaaaaggcaaggcactcatgagggcatggaagcagagagacagccaggcacatccttttctctactgtcctggtttgcttgggaatttgccttgccaagcatctatttaagacagcgttatcccatatccagtcatgggtgttttatgctatacagcaaagccctttcagagccacctctggacatgtagttgcctagcaaataacctttccatcttgagttcataactgatatttgaatgtgactgggcatttctaaaattaagcttttgatcctggaaacattcacagctctactagagaaattgtcattctttctctactcctctctccacgtgcttgttagatttttccatacgttgtttataataacttttccttgtggttgaagataacagatttttgcttttaattcaagaaatgtcgtctgctgtaatgttttgcaacatgatactttccaagtttcaaagcgagcttgtgttgtgggattgtgtttttgcatctgaaactgtaggggtggtgataatatcccgatctacagagtgcagatcctctgcccttccatccctgtcagtgtgtttaagggaacgtaaaggatttttctgtcattgtaatttaaattcagaaggagtctatttgtatggtaatcatgagctaaggaaaacagtgtttcatttctctctgggatttgttttctgacatcttcacattctctactactttaacctggcaacagcatattaacagcaattcatactctgtattttaacatgtagaacagtacccagaagattaatacatgatgaggagaaagaagtaagaagggaggttgaggccataattaattttgctttcatgcaccatatgctggtgttttctgatcttaactgaaattagggtcaccactgagttttcaatatttaaaaaaatgaccgtacatagtgaagcacaaataaaattgcccttcttttgaatattaagcttccaacttggggatgcaaattatattcttgttgtttggattcattatttttcaatgaggctcttttagtgggtggggaacgggggctaccagtgagaacaatcagaaagaactccgctaactaactgcttgttggcctgccctgaacagtggaaagatgaatagttaagaggcttctctcccaatctaagtaattactgcatgttcttgttttaaatgagagagttgtgaggctaggggttatatcttcaatcaccccaaatgacacctccttgttcacaaaacgaattcaattagattaatttccccagatgatcctattaggtgagacgattcacataatacgtaaggtctctttagatcaagggtcttatgctcagaccttatgctgcctacatgagcagataggtaacattagggagtgaaatgtggctggtcatcgagctgcttctcccaagaaagcagggcattggctttgaagttctggctggaagctttactgtaaaccaataaaggtggccaaatagccagtctcaccctgcctaaaagggggcagccgctatttaatcccaacagatgattgactctggaaggttgccctgaagttgccatattgcattcttcaagagactctacaaagtactgttttcttgtgaaatcccctgattattatacatgttagttcaaattgaaaagaagcaatattttgtgccagccaagcaaaacatgcctatagccttaaaattggcaggtctgggatcaaaaagagaataaagggaggctacatacggcaagtgtaaaactgtaaaatgtaataaataaaactaataaaatatgttctgtcttccaactttgacagatgttcaaacctgaaagaccaggtttgaaatttttagttgtttcagccctctgagtaccagcacgaggtagagggaggagagcaggccctacctcccctgcttctgccctctccccttctcacccccagctgtgtaccacatgcatgtatgtagagaccccaggcccacactctgctctgtccctcatcaacagccatccttctgccaaccttctgccctgggtagtatgaggcacgggctgccctagagataatggatcatgtgaagagacccacttggccctgaaacagagtaggtgggcatttgagcagataatttcagaattcctggaactagagtttggtctagaatctagatttagctgatgtgtggagggctgtgcagaggctctggggggcacatctccttggcttcttgggctcctggccctgtgtggagaggcatggtaaaggagacaggtagacatcttcggccttggctggaatctacaagcagtactagcttgagcacttgatttatagaatatttgttccagatgagaccttagagtgttttattaatcccaaggcctcagtatacgcagaacgatcctgtctgatgagaaatagaagaattacaggctttttagtcagatatatctgaacttaatccatagtccagtcatttaccatgttggtgacttgttacttagcttccctaagccttgttgtgcccctcaggaaaatggagatgaagtggattttatactgtcgtatcaagggcttttatcacccgttatgctcttgagacctttgaacagtgggtcatcctgacagaataccctccctagggaaggtctattccatgtgactctctctcaggcacagttgtttgcttaagctcttctgattaaatacaaggacattcttaggcttccctttcagtccttgaattatctttttatttttcataagaaaagggagcagcaaagaaaggaaattcgcaaaatgatgttgcttaaacctcaaaaagttcatgccttttccctgaactgatgatgataacttttcaaattttagggcacttataacaattttcaaagcattttgtaattttaaaaattaatttgtacaaagtacttggcacatagattattggctaagtttccctagaaacctatagcagtgtaacttttatgaatcacctcagtaaaagatctttctgaaaaagtcttttgttttgctttgtttttgacttgggaaggtagggaagaagtgagagagggggtattttccttactaagtgaaaaacatattttaaatgtaatttaaaccaaagcttatctgaagtgataagactggttatttgtgtggaatttaaaatttaataaagaagtgagagaagttggcatttgcagtttttattggccaacagtgtcaaccatgtattgttggcatcaagcttatattctcttatttagtatattaagtcaattgattaaaagcagaaaacctggctaattagactgccaagatcttaatgttaactgtcagattctaaagctatataagcctgaaaacacctttatagattacttcttctgggtgccaaatggttctaaatgctgaaaaatgtcataattgtccccccttcttctgagaaaggtaatagatactattggatatccacttccttacagactcattcacattttttcttgtcctggatagtatccccactatcagggcgttttcatttagggccagcaataatccgtattttgattcaagcagaactagttgtagattacaatatttcaagccaaggttcccattcaaactgttttctgctgctttaatcataaaggaatcatttactcttacaatgctggaaattaaggatttatttttcacttaccaccattttcactggtatttcagcagtcattgaagtacctttctctcctcttcggttacatggccccattgagctggaagatggattatgcagtgagactcagtttatggtagaggaagacatatgacaatgttatgactttggcatttacttaaggtacaggttgatgatgatgatgataacttatatcttggtttatctttgccaaacatacttagcattcattatttaatgctcacaataacacactgaagtgatattatataatgtggcattatataatcactccaagtttgtcattgaagaaattaatgtttagaaatctaacttgccagagtcagttagtaaatagaagaatcaggacccaaggccagattcattgactcaagatcctgtttttttgtacaatacaccgtggatagagagattaatgatacccaacattttttagtaataggaacgctttacatatatactctcatttcatttcattccaataagccagaggagggcattatgattagctgcattttataaacaagggtactgaagctcagagagttttagaaatgggccataatcacacagcctgtaaatggaagagttaggattaatcccacttctgatatactctagagcttgtagagtctgcattgtctcttgacctgaaaagggaaaaactttcaagaattaaaagccaatttttgttttaaatcactttaaatggtatttcacagataatgctaagaaattaggctgtaaaagaaatgtcaaggtgtatgtatttgagttccccaagcaaaatttccaaaaggggtctttttttcacatatatgagcattgtgtactgtattaccactcagtttaaagaaatagaacaccagccaagagagaagagccaggaagctgctcactgtgatgttgtaaatgttcagtgattagagtggataattattgatattattttgtaatttattttgcagaggatatatctatctgcagatttaaatatatatactggctcaagatgcagaatcttttccagggaaattttcatagttgtcctcattctaaaactgctgtcttgtgacttcattgcattagactatgatgaccactgggagtattggccaaatcctcctccctgctgacctgagtagcctctctgcagagtcccctgctaagacagtcattcacaaacaataggtggccattgccagcaatttgagcacagcagtcctcatacttggcagcagttaccagcaattggcaagctattacccaaatctcctgccaagtgaaagctaggacttttagaattaccttgttcctttcacctggttgccacatttatcttttttttttttttttaaaagagagtgttttgtgtgcaagtgtacttctttataggcttcatgctaaaatgtccctggcatgggtatatttgggtctttaaagtgcttagcaaaaggagtgcccttccatattgaaatgcaaatctttccttgggtattaaatttgatttggaagccctcttcttcttgatttattgatatcaccttgaaatcacaccatcctcagtctttaagcatcgcccagtccccgtattctgaactatctggccaagatgaggctgagtctcagacagagtgttgatacctgtccacccattattcttcacagccctgatctgatccctgtgaggcagggctgagctccaaaggttagttagagaccaattggaggtgagcaaatacctcaattacagcaggtatctggatcctgtctgaatttcaccttctgaaagaacctgtagtagaaatacaaggttcaaacttgcattctctagggctttctaaatctctctactctgggaaaactattctgtaaatgtctatccatcttggttgcatttaaaatatggggcctcattctcctctgccttccatctgattgcaacttgggcctaggtgatcttggtcccatgttttttttgttttgtgtgtgtgtgtgtgtgtgtgtgtgtgtgttttctcatcaataaacttttcttcaagccttctgctgaaatttggattaactcaattttcatagaccctgcagttcaaccttctgtattttacaatgactcctgctattgtagaaatagaagacaagtgaggaatctttccttttacaattctgtattatcttaaaacattcaaagaaaccatttcttactgaaacagctgtacttggttatgttattagaggagacacactatggacttattttgacagtgaaatatatttagactaaaattttaaattactcatctagctaaggtgtgttgctattccataatacttctcaagtgttttgtgtttcaactttcgggtttctttaagaaaacaaaaacaaaaacaaagaaaactccatcaagttagaatagaatgtgagaaatttggtgtataagataaatctgtctttatgtttctccaggcaaataatgttttatactagagcaggcttcctgcctttggtatgctcagataaattaatttgactgtttatgatgttatttaattttcaataattattcaagcatatataaccacagacatctatgtagtaggcagatggatcagcaattgtgcatgtaattagaaataatccttgaaatacaaaagtagattttaatattcagcatctaaaaaattgctaacattacaaattgcccataccccgtggttgcagccagtgatgtaaaaatttaaatacaagaattcaaatgaaaatttctgccttctcagcatcaagcagttattgaataacagtagaaaatcatggacaagtcacttaaagagacacattctttctctcttaaaataaagatttgatgtgtttttaatgaattacaatgtgaataaataaattgtaaataatttagattggagtgctctttgtaaaagtcacatactcacatggaaaatattaaatgggaattatattagtaaatacaagctcacttttcaaaatcttatagagaaagaaacaaaaaatattctatttttggttcttaaaatgtatgctagaacttatatttactattgccaataaaatagggaatgtactttattcattttctgttgagagagagggaaagatgaaaatgagttcatatggtaaaatgagttatgatttttagattactgagttctgaattcaagttcatggtctgctatttacaagataaataacaaagcctttaatcttaaagtctcaggatttgttgacatttttgctgtaatgcctactgtttatgtttagcactatctaacatggtccctgacactttcataatatcttaaaaacttacagtaaaaagaaaaaaaaaaagaattgttagccaggcatgatggcacgtgcctgtaatcccagctacaggggagtctgaggcaggagaattgcttgaaccccagaggtggaagttgcagtgagccgagatcgtgccactgcactccagcctgggtgacagagtgagacacgttcaaacaaaaaaaaataaaagaaaagaaaaaagaattggaaatatggaaggaaatagaggaaatatggaaggaaatagaggaagatagagacagaaagaaaaaaaagaaattgagagacagaaaaacaagagcacttttcagcttcttctcattcctaagccaaaaaaacaaaacaggtttttcaaggagtaatatcaccaccttatggccttttacaataatgctgcgaaaaattaatattccagttgtatttttgcaactataaacatcaattctttactcttagatcaaaggtcacatcttgttcatatataagatattttctatcttttctttttgaagtaataataagcccaatatcaggtatcacaaatgtttgcagagttcctgcttagtgccaaaagatgtatctcacatctctacttcattagatacaaagatgaataaggcacaagtattagcttcaaagagcttagagtttggagggctgtttcttccagaaagaaggaattcatggctagtgtgttctgacattgggttctgtaggttaccgggcatctgttcaactttagaatgtgagaaggctggtagtacacattaaaaccagatgtttctgtgcaaaacaatgaaggaacctgggccttgggcccttggccacactgggagcagacctaaactctagggagcattgatgggaaaattgtagacataaattctagaatctccgtcccttccttccttccttccttccttccttccttccttccttccttcctttttcgttgtttctttctttctccctttctctctctctttctctctttctttctccttccttccttccttctttcttttttctttctttctcttttttttgagacagagtatcactcttgttgcccaggctggagtgcagtggtgcaatttcggctcactgcaagctctgcctaccaggttcaagtggttctcctgcctcagcctcccaagtagctggaattacaggagcccacttttatgcctggataatgtttgtatctttagtagagacgggatttcaccatgttggccaggctggtctggaactcctgacctcaggtgatctgcccaccttagactcccaaagtgctgggattacaggtgtgagccaccgtgtccagctccctgtttctttgttattgtgagatgcagggcaggataggatttggttcagggaagaaagaaaatgaatggaggaggccgggcgcagtggctcatgcctgtaatcccagcactgtgggaggccgaggcgggcagatcacaaagtcaggagatccacaccatcctggctaacacggtgaaaccctgtctctactaaaaatagaaaaaattagccaggcgtggtggcaggtgcctgtagtcacagctacttgggaggctaaggcaggagaatggcgtgaacctgggaggcggagcttgcagtgagccgagattgcgccactgcactccaacctgggcgaaagagtgagactccatctcaaaaaaaaaaaaaaaaaaaaaaaaaaaaaaaaaaaaagaatggaggagttggcagcattaactgtctatttcaaagccattactagaggggatactgtagaagtagggagcaacccctggcttagtgcatgagatcaatgctggtagcagttatagcctaactctaataccaattttgatctcacttcttctaaacataatgtaaaagtcaggagtatattctctgccccgcttttgtgccaggccttatattgtctattgcccatacatgctggttacaggcaaagtctcctttccttatgaagaaccgtgtgctatctgtgtcatggtgcgttgttgccagtctctttgatggccatgtgcactgctgcgcttgtcactacagaagtgtgaagcatcttctctgcagcttctgatcctgccgtgtctgctgcactgaagctcataatctgcgagagaagatgccactggggattaaagcgccagcagcatcattttattcatttgtctgactgtgctaatttgccagtatcttaggaagaaaatactactacagagcaatggttttcaatcctatggtcatgacaaaagctttgagaccacacacacccactatacacaccaatcaactcttgtttcaattttttcccattatatctaggactagttggtgctttcaattgaaaatttgcaggtactgcaaacccagagaaaaatgttctcttcctggaatatgagataacttgatgagatgatgctgcgattctgtgattgtcactacaataatgtaatagggattgtattgcagcattaacgatttcaatagctgagtgggaaatgagaaaatatgtttcctttggttacggttagtagtaatattatgtaactttgcattggaaataacttaaactgtgtgccttaaaattagttttaaattgaaatgggaagctgtggttatttgaagatgtttttcttttttattaagccaagtgccctctgggataacagtttgcgtacctctaactcctgggccaaatctagtttttctttaaggcttgtattggtttgttcattcaggtgtgtctaggccaccttctggtcatttccttttcagctaacacccagagccaagctcagcagagaacttgctctcttatcactgcccctttgtgccttgtgtctgagcagacaaggaaagcagtggcctgtgttgactaatcctggcagctactcttcttcctcaagactgggtcagagccctgctcagtcattggcagaatcagcaggattcacagactcattccaaggcttttatgcagttctgtgtttttaatgaaaaacacacaaacacacataaaattaccacactcaccacagaccttacattatgtcgttcctttctatagcctattggttaagagtgtgattttgcatttatatcccagctctgccactagtggcttgtgaccaggcaaggtaagcataaaccttaacagcctcggtctgctcggtttaaaaataggactgataatagtactgtttattgtggattacggtgagtgttatatgaggtcatgaaggaaacagtgcttaattcagcacctgggacataataagtgctcaacaaatgttggctatgatgattgttttatgagtttgctcatagccaactcagtttactgtagagggctgcacttttctggaaaccatatcaagtaaaggctattctcctgttctgcataacctggaggaagaggattcaaggtgacttatatccaggctcttcttttaaatttttgctattcttttagctgttatctaccagactcctggatgttttcccaccagtcacgtgccctgtgccttgcttgccgtcatcctctctgtccttgccctcaccatttgtctcagtgcctacaatgcctccatgggtcatttccatctaagtcatttctattcttcagcccatttccttggcaaagatggtatgtttttatcaagtcctattcctgacactgaattctcataatcctttggttctctttttctgtttacatgcctccctacccattgaaaagctgtggtgatttgttaattaattcatgtgttcatcttctgatatcagaaatatctgtgaggccctacactgagcgcggtactctccaaggtgctggaatactacaaggaacctttgtttcatgaacatgcttaagtttccacacgcaatttatcatgctgtaactctgggtccctgcagtccttggttgtaactgctctttttaggctgccaagcccaccacaggagagaaaaaggtcacagaattgctaatcagctccattacatattattcctcgaaaatgctccatgattgcccaattacaacactcataacaccctaaaatgtaacgtaccatttacgtatctgtctcccagctctgccctgagctcctgacactgcctcatttgtttatgcccctgatctaaacctggcttagagtagggattcaatgaatatttgttgaattcatatcaactcattcatatcttgttttcagctttgtaactggtctctaacttctgcttggcaaacccatttttcatagttttcatctttctttcgctatctattgcattcttccctgtttctacttgaaacttttctactttcctgtacagcccctcctccatcttcaccttctgcagaataacttggttcggattttatggaggatgttgactccatctgacgtaagtttcctggccttaccattatgctgcttattaccttcacggtacctcactaccaccctgttataggagccagagaagtgacctcaggtctttccgtctcccaggattcccctgcacctgtgactcccactgtgcccgggctgatgacttgtaataaagcaaagacttaaagagagtttgttgaatccctttccaaggagctgttcagattacttaccttagactgacaagatttcgtggtgcagtggctccatacattgtatcgccatgtccccactgctgtgaccaactctcaagccagaagtcagccagatttctctccagttgaaccccaggccactgatctccttagctctgaccttcccaagatgaggttggtccattcttgataaattctgtatcagattctgtgccccacctgaatccagccatgctgcaggtatagactgcagctctctgccccagtcagactgtaggatgcctttaaattcctgagcattagtggaggtgataaaacttgcacttttgtcctgatgtggaagggaggaaaatgaaatcctgtgatgtcttaaaatgtcctgaaatcttggcctatgatatactaggaacctagaaatgttctgaatttaataaggaaaataaaagagccaatcctctattcctgagggctaacttatttggagtgaagattcaccaggattgcctttgacaaaatgtgagcctgaaggctcttgccacatattatatgagccttattttggagtggcttcttttatttggccaggctagatatctcctgttatcacattcaggcatttgctgctgccccctggtttgtgagacatgcttagagatatgaatcagcctataaagcgcatctttctttaggaaagtcctgggcttgccaggcatgcaaaagactgtgatccccaggagagcagagggtactttctgtcctcacagaggcacttagttgtcaggatgcttattccaggaagcttaattacaaaccactgataggaatttattttagtaactatagaaaatgtttatttaggtaagagggaattttccattcctgaagataagctcttgcttaaactagcattcaattacttttcaagtggtctcagaagccaaagtgtgagtgtggtatgtgatagattcatatgtgcacgtgttgtgtttatgtgtgtgtgtgtgtgtgtgtatgcacgtgtgtgtttaagctgctgagtacttaaaacctgctttagtattgtgatggttatttctagtaggaaataaggctgtccaatttatctctggcactgagcaagccctatttgtctctggcatgaagcaggcttagctcatctggtgctgtctctggttatcatactactcagcaggggtaatttgttttgttttatttctgtcccgaaaggtaattaataatacaaggacaaaattgtttgtgtagtgtttttatatttttgattacccaaagaagtatttttcaggagcctttccaaatagctgctttgcacctggctggaaaactgtactcctcggcgacaaagagctaacttttggaacccttccaggggtccaattctttaccttcattcacctctgagccccattcaatgtgggtcaaggaggatttttagagggtattaatatcagtgaaaagtctttggtgcatagtaacactgagccagaatgattttctggcttctggcagtgatttaaagaaatcctttggaacgctgttacatgctaggtgtcctgctaagttccttctatacatcttacttaattgtcacaacaaccaataaggttgctattactattctccatttaagaggtgaggaaattgagatttatgataatatagtatttaaaacatgctttttgttatttgtgtgtgcatgtatttttttggtaacagtttaattagatgtcattcacataccatacaattcacctattcagattgttcagttcaatggtttttagatatattcagttgtgcaaccttcaccacaatgtattttagaacacttatatcacctcaaaaagaaccttataccctttagctctcttatgccctgagccccaagcaacaactaacctactttctctttatatatatttcttatgctgggtgattgtttacttattttcctttttttttttttttttttgaaacagggtcttgctctgttgcccaggctggaatgcagtggcatgatcatagctcactgcaatctcgaactcctggattcaagggatacccctgcctcagcctcttgagtagctgggactataggcatgcaccgccatgcccagctacttttttaaatagttgagagtctcactatgttgcccaagctggtcttgatctcctggtcccaaatgatcctcttcctctgcctcccaagcactggaattacaggcatgagccactgtgcccagcccttatgctggacatttcatatgaatttcatgtaagtggaatcacgtaacatatagtcttttgtgactggtttctttcacttagcataatgtttttaaggatcatttgtgttgtgtgtatcagtatttcatttctttttatggctgaatgttgtatgcatacatcaccttttgtttatccattcatcagctgatggacgtttggattgtttctgtcttttgactattagaaacaaggatatgaatatatataagttttgtatagatatatattttcacttttcttacaaatatatcaaggaacagaattgttggagcatatggttactactccgtgtttaattttttgaggaacctccctactggtttccaaagtggctgcaccattatacatcccactatcagtctatgagcatttcagtttttccacacactccttaaaactcatctgactttttgtttttagccatcatactggatgttaagtggtatcttattgtgatttcgatttacatttgcctaatggccaatgatgttgaacatttcatgttcttcttaggtcattggtatgtcttctttggagaaatgtctgtttaagtacttcaaaattgagctatttttcttcttattagtgagttgtaatagttatttatatgtactagatagaagacccgtgtcagatatatgatttacaaatatttggcttgtcttttactttcttgataggggcatttgaagaacaatgggttttcattttaattttaataaagtctaggttttttttttatttgtattgcttgtgattttgcttttgcgtctaacagcccattgccaaatccaaggtcacaaaaatttacccctgtgttttccttcttacttttgttgttctaagatatatttttctttatatgggcatattctctggttgtagaatcttggaatttgatcacatggctatttaaaacaataaaaagaaaaagactctgtttatgctgtgtatgatcacaaaaacttgtgtcattcagttttagtgttgggctttctaaatacctcattctgctcatcagacatcatttttgttcactgtaggtgctggcagatctctggttggaactttgttgttattcattggtcagtttatgaatgagtcagatatttcagcttctgtgttttatctgatcctatacttcttttctgttattccattgttccctctaattggccttataaaagtatttctgcagaaataccagagtatttactgcaaaaacttttcatactttaaaaatgccaaaagaagcttttagaaaaggaagaatacctgtcaatgtggtactctcttatattaacaacttttttgacagaatgtttaaaaagtgatttaaggctgggtaggcagcacttatctgtgggaaagaaaattttcagttacttaatagcctgtctgaggcacttgcaaggaaaattctccaaatttcagacatttttgtcaccacagtaccctagtgaatatagcatggctgatacttttacagctattccttcagtattgacagtctctcagatccttctacttcgtgtgtgtgtgtgtgtgtgtgtgtgtgtgtgtgtgtgtgtttacccaaaatgcttccattatgatgcttacctaccttatgtattaataatgttctgagagctgtttgaaggaaagtgtgacatttatacaaagaaaagtcaattatttgtttaatattcataaaatttccataaaagtctaagcatttgaaaatacttgagagtactgaaatatatttctttacatataggactttgttcccataaaaaatcttgtctttcgtacttcttgtgacttccttctttcgttttctcagagggagtattggtttgtttcaaactggcatcaacattttgattcttttattatctatttatttatttatcatttatttatttatttatttatttttgagacggagtctcgctctgtcccccaggctggagtgcagtggcacaatcttggctcactgcagcctccacctccagggttcaagcaattctcctgcctcagcctcccaagtatctgggattgcaggcgtgcaccaccacacccagctaatttttgtatttttagtagagacagggtttcatcatgttggccacgctgatctcgaacacctggcctcaagtgatccacccatctcagcctcccaaagtgctgggattacaggcgtgaaccaccatgcctggcctaccatttggataattttaaacaataaataagaacgtctcctgctcatgaagtaggagtatttgtgtctacatttattcattaaagtgggtaattaaattccctgcctagggtcattgttactttctacctctttgctgttttctggatggtttcacctccccacaggcagtattcactaatccctttcctgactttccttaactctgattatcacttttaagcccttcagtaacaaacattcagtttttacatatatgaatcagtacttgggtgtttatattcatatgcaatttatatttatattcatatacaatacctcctatttgtatcatatacaatacttcctaccatatagaatgggaaattccttatggaagctatcctatcttctctctctctttctctacattctgtttctcacgtattttcccttgcatatagaaggccaagataaatacgtacggattttatttcatgttctcccagttactctgatgtaaatttcttaaccttgctgagcctcagtcttcttacctgtaaagtggatatactatctcacaatgtgtataggtcagggttctccagagaaacagaatgaatagtatatatatgaggagatttattatgggaattggctcacacaatgatggaggataagaagtcccatgatatgctatctgcaagctggaaaaccaggaaagctgatggtgcaattcagttagagtcagaaggcctaagaactagagggtgaagggcaggggcataagggactctgttataattcctggagtttgaaggcccaagaaccataaactctgatgtctaaggataggagaagatgttgatgtttcagttaaagaaaatagagtgagagaaaatttgcctggatttttcttatatctggccctcaacagattggatgctgtccactcacacaggtgagggtggattattattcagtctactaattaaaacgctaatctcttctagaaacaccctcacagacacacctagaaataatgtttttaccagctatctgggcaccctttagcccactcaagttgatgcataaaattaaccatcatatagtgctatagtacatatgaattgaaaaaaattttttgaacagctttgaatttggggccaaatttagaaagagctggagaatgtggcttctgcctgttatttctttgttacgttgtacccatggattctcctcttccaagtccagtatcatcttttgagtaattgctcagaaaatattttctaattggcttctgggtagctacttcattatctgaacataaaaataattctctgtgcataatatggactatatatataagcaacagcaaatatgtgagtaagagggagggactgtaagtaatgctagtgattgactaacacagtggccttccaactttttgatcatgtactcttataagtaaaacattttgagcaggcattcccccaatattttgtgattgactgaaacatagatttatattagtcaacttcagacactaccaggttattcaaatatattattgtaattactactaacagtaataaaaattatcagtgttctttaagtttcagtcaagagatatgaatgaggataggctcatgataacttactcattttcactgagaaattcaagaaattcttgagactgaatttctctcgacttatcctacttcgaaacccagcttaaaattcataccctcaaagggaagcccatcagactaacagcagatctctcggcagaaactctacaagccagaagagagtgggggccaaaattcaacattcttaaggaaaagaattttcaacccagaatttcatatccagccaaaataagcttcataaatgaaggagaaataaaatactttacagacaagcaatgctgagagattttgtcaccaccaggcctgccctaaaagagctcctaaaggaagcactaaacatggaaaggaacaaccggtaccagccgctgcaaaatcatgccaaaatgtaaagaccatcgagactaggaagaaactgcatcaactaacgagcaaaataaccagctaacatcataatgacaagatcaaattcacacataacaatattaaatttaaatgtaaatggactaaatgctccaattaaaagacacagactggcaagttggataaagagtcaagacccatcagtgtgctgtattcagtaaacccatctcacatgcagagacacacataggctcaaaataaaaggatgaaggaagatctatcaaacaaatggaaaacaaaaaaaggcaggggttgcaatcctagtctctgataaaacagactttaaaccaacaaagatcaaaagagacaaagaaggccattacataatggtaaagggatcaattcaacaagaagagctaactatcctaaatatatatgcacccaatacaggagcacccagattcataaagcaagtcctgagtgacctacaaagagacttagactcccacacattaataatgggagactttaacaccccactgtcaacattagacagatcaacgagacagaaagtcaacaaggatacccaggaattgaactcagctctgcaccaagttgacctaatagacatctgcagaactctccaccccaaatcaacagaatatacatttttttcagcaccacaccacacctattccaaaattgaccacatagttgaagtaaagctctcctcagtaaatgtaaaagaacagaagttataacaaactatctctcagaccacagtgcaatcaaactagaactcaggattaaggaactcactcaaaaccactcaactacatggaaactgaacaacctgctcctgaatgactactgggtacataacgaaatgaaggcagaaataaagatgttctttgaaaccaacgagaacaaagacacaacataccagaatctctgggacacattcaaagcagtgtgtagagggaaatttatagcactaaatgcccacaagagaaagcaggaaagatccaaaattgacaccctaacatcacaattaaaagaactagagaagcaagagcgaacacattcaaaagctagcagaaggcaagaaataactaaaatcagagcagaactgaaggaaatagagacacaataaacccttcaaaaaattaatgaatccaggagctggttttttgaaaggatcaacaaaattgatagaccgctagcaagactaataaagaaaaaaagagagaagaatcaaatagacacaataaaaaatgataaaggggatatcaccaccgatcccacggaaatacaaactaccatcagagattactacaaacacctctacgcaaataaactagaaaatctagaagaaacggataaattcctcgacacatacactctcccaagactaaaccaggaagaagttgcatctctgaatagaccaataacaggatctgaaattgtggcaataatcaatagcttaccaaccaaaaagagtccaggaccagatggattcacagccgaattctaccagaggtacaaggaggaactggtaccattccttctgaaactattccaatcaatagaaaaagagggaatcctccctaactcattttatgaggccagcatcatcctgataccaaagctgggcagagaaacaaccaaaaaagagaattttagaccaatatccttgatgaacattgatgcaaaaatcctcaataaaatactggcaaaccgaatccagcagcacatcaaaaagcttatccaccatgatcaagtgggcttcatccctgggatgcaaggctggttcaatatacacaaatcaataaatgtaatccagcatataaacagagccaaagacaaaaaccacatgatatctcaatagatgcagaaaaggcctttgacaaaattcaacaacccttcattctaaaaactctcagtaaattaggtattgatgggacgtatctcaaaataataagagctatctatgacaaaaccacagccaatatcgtactgaatgggcaaaaactggaagcattccctttgaaaactggcacaagacagggatgccctctctcaccactcctattcaacatagtcttggaagttctggctagggcaataggcaggagaaggaaataaagggtattcaattaggaaaagaggaagtcgaattgtccctgtttgcagatgacatgattgtgtatctagaaaaccccattgtctcagtacaaaatctccttaagctgataagcaacttcagcatagtctcaggatacaaaatcaatgtacaaaaatcacaagcattcttatacaccaataacagacaaacagagagctaaatcatgagtgaactcccattcacaattgcttcaaagacaataaaatacctaggaatctaccttacaagggacgtgaaggaactcttcaaggagaactacaaaccactgctcaatgaaatagaagaggatacaaacaaatggaagaacattccatgctcatgggtaggaagaatcaatatcgtgaaaatggccatactgcccaaggtaatttatagattcaatgccatccccatcaagctaccaatgactttcttcacagaattggaaaaaaactactttaaagttcatatggaaccaaaaaagagcccgcattgccaagtcaatcctaagccaaaagaacaaagctggaggcatcacactacctgacttcaaactatactacaaggctacagtaaccaaaacagcatggtactggtaccaaaacagagatactgatcaatggaacagaacagagccctcagaaataacaccgtatatgtacaactatctgatctttgacaaacctgagaaaaacaagcaatgggaaaggattccctatttaataaatggtgctgggaaaactggctggccatatgtagaaagctgaaactggatcccttccacacaccttatacaaaaatcaattcaagatggattaaagacttaaacgttagacctaaaaccataaaaaccgtagaagaaaacctagacatttccattcaggacataggcatggacaaggacttcatgtctaaaacaccaaaagcaatggcaacaaaagccaaaattgacaaatgggatctaattaaactaaagagcttctgcacagcaaaagaaactgccatcagagtgaacaggcaaccttcaaaataggagaaaattttcacaacctactcatctgacaaagggctaatatccagaatctacaatgaactcaaagaaatttacaagaaaaaaacaaaaccccatcaaaaagtgggcgaaggacatgaacagacacttctcaaaagaagacatttatgcagccaaaaaacacatgaaaaaatgctcaccatcactggccatcagagaaatgcaaatcaaaaccacaatgagataccatctcacaccagttagaatggcaatcattaaaaagtcaggaatcaacaggtgctggagaggatgtggagaaataggaacacttttacactgttggtgggactgtaaactagttcaaccattgtggaagtcagtgtggcgattcctcagggatctagaactagaaataccatttgacccagccatcccattactgggtatatacccaaaggactatagatcatgctgctataaagacacatgcacacgtatgtttattgcggcactattcacaatagcaaagacttggaaccaacctaaatgtccaacaatgatagactggattaagaaaatgtggcacatatacaccatggaatactatgcagccataaaaaatgatgagttcatgttctttgtagggacatggatgaaattggaaatcatcattctcagtaaactttcgcaagagcaaaaaaccaagcaccgcatattctcactcataggtgggaattgaacaatgagaacacatggacacaggaaggggaagggaacatcacactctggggactgttgtggggttgggggaggggggagggatagcattgggagatacacctaatgctagatgatgagctagtgggtgcagtgcacccgcatggcacatgtgtacatatgtaactaacctgcacattgtgcacatgtaccctaaaacttaaaagtataataataataaaaaaaaattcatgccattcagtcaatccgcaaatatttattgaatgtctcctaggccacctgacagtattctaggcactgagaatataccaaggaacaaatcaataaggtgtctgtcattatgcaaatcaacctgttagtagagaatcagcagagtggaggcaatcacaatgcattttgcaatttctaaatacgtttaagttcccccaagataagaagaatttaaatgttactggtattaatatgcatattaacatggatattgtccctttatccatgaattagatagtgacctaccaggtgcaatatttgtagtatcccgatggcatgatgagatagtggaagtagactagtgagtacatttttatattgtgtgtataacttatagtgaggaaaaatcatttatatatgacattgcctcacggggattgatgctagcaatggaaagaacatgaaatttgttcctcttagaccctagtacacaaaactgtaagaaaatctcaggcaacatttagaacattttgattagactgattataatgtagtccttcaaacccttgaatgtcattccattgctaacagaataaagtccatactccttcacctggcatgcaagatattcactctctgcctcctgcctgctttgctagtcttgttaactcctttttcagatttgtacatgtcttgaatgtcatcttcaccctatttatccaacagtttccaactcgtccttcaaaactctgctgaaagatcttcccctctgcagtcttcccagatgtttccagacaggtactcacagtgtgctctgacctcaggtggtatcttcatgtggatacctgtcaaccctctggtcactgtattttaattatctttacctctctcttcccctcactagactgtaaactggtaacacaaacctgtcctcatgaaaacgaaggcaattttactttgggaggaatttcagatacagcttaattttggggggttgaaaggtctctcccagtcagctgtcacataactgaacttcactgtgcttatttccaagccctctgtttgcaagtagaagcttctcatgacttcagcatagcccagtggctgagaccaggtgtcagtcagcctggagcaatccctgctctactgcatactagctccgtgatcttatgttacttaacctctttgtgccttcatttccttctcagtaaaatgaagataacaagcgtacctattttatagcattgctgtgaggtgggaatgatgtggaagtgcatgcaaagccctcagaatattcagtaaatgctagctactgttgttaaaatgcatagtctatgcaatcacacataagtatgcctagccttcagccaaagtataaatgacatatcaggcttttgtttgttttgaggaagcctgatgagggggacagagggaaggaatgttaactcagaaagaaaagtaacgaaagttgagaacaaggcctcaaaaacactattgcctcagttttcccaagagaaatcggtgagtttggtagatttccagttgtactggtgggaaattgagcagaaacactggcactcatgtaatttttgttcttgttctttctattgttgttttctccaagagaaattgttaactttgctatatatcccaccgtattcatgagaaatgtagtgggaaccccactgcattaatgtcccccctttacttgtatcattttgcatatttagtagagctaagatgcttgctgccttcattaggagcttgctgtatgcagtgggaattgcaagcctccaccatctcagtggctcatctcagtaattggttggaaaagtgatttccaacagctcatgctctctggagctatgactttgagcacttcatctcaccacaggcctccttgtcagcctgtgatatgttatggctctcttttgtctgaccgtatgtattctttcattgtctctgacagcagggtctctgaaatccacaattttggttggtgatgagaactgaggtcagtgtttatttgacagtcattttggtgccatgtagtaaaattgagcaatggctgttgagtaaagaacacggtgaatatgcagcaattggcaagtatggaaaactataattgatttaagttgaattcactcctgagcctcattccctcacagtgctttccagtgtctgccaagtggtaataagagattcaaactttgtatctctcctctagactgtgagattcttgaagacaagccagtccttggtcatcttgtacttgcacataaagcagattgagcatatatgaagttctcatcaaatgtccaatgaaggattgtgtgtgagacaggatctaagcatggtgttggataatcattaatgatgtcaccttgagaaatgttcatgaagttttgattatgaaaatttgagaacatatgcacaagggaagagaacagtggaatgggcccttgtatacccatcctccagtttcaacagccatccatccttagccactcttgtttcatttatactgattttacccatcagaatattctaaagaaaacctataggtaagatttgggtatttatgtgcagataattccatatattaaataaatgccctgcttaatttacattgccagccttcaagggatatttgctaagagcaagctctatacagcatttttcatgcctcagattgaaaaaggcaccatccctatctgtttgcacactgttttgaccacaaagaaccagtcgttttcagggtttctcaagattctcattgcttagtagcttgtggaactaaactatgagcaagatatgatttcagtgtcaaagtgtggaagcttgctcatttgttccttcgttccttcattcagtaaacatgtgtaagaacatgtctccccatggaattgctgtggggatgaaatgcctgtcatctaatgagtggtcagtaaaagttattaccattttatgattattctgtaccaaagaccgtgctgggtcctaagattaaaaatcaaaaacaaacaaacaaaaatttaaaatccaaaccttttcttagtctttttctaaaactctttgtctagaaatatgatcattttagagatcctaaagagagcctaaatatgaagaatgaattaggaggaaagaggtaaggaataggagcctagaaaagggaactggatggacaagatacatatggttagagtgaggctctggtgggattcctttccctgcttcttaaggatggcatgtactctcccaagcccatactattccatgctggggcacaggcagctaggggtgagggaagggtgggcaaaggatgcctgctggcctcagaattagtgacaagcagcagctatcaccgcaggacctgcacctcacacccaacagtcatcaggatcctaactgccctagtggagcacagttcagcctgttagccccaactggaaaggtcactttttcatagtgtgactttcaccaccatccattagcacctcacttctctttgcagtttttactatgacttagtatacattttgtgaaacatcatctttggcctaaaatttgggtatgtgattccgttgaatactcacttacgtgtcttttgcataggtctggtaagactcgcatagccactcacatttcttctttctctctgtatgtgtttctctctctgcatctcctttagcacttagctcttctttcctggttcttagttttctttatctatatctcccttctcctttgtggctccttcccaattttgacttccttctgcatttgatttctttctttactcactatcccgttttttctcagctttcttcttgggtgcctatgcaagggcattcagggatgtagcgtttttgcacttctgaaaacatcagagaactttaacatttcactgtcccatatttggggatagaaagagagcttgaagcctcacccttaaattgaggtgtggctcttacagccctgacaggtgccttaccatgtactcttttgttcatttggatgctggcagccgagtgctccatgtgcctggcactggagattcctgtgagtgtgaaaaagacatggcccctgcccttatggggctcaccatccagtgtaccttatggtgaaatgctgtgcccctaaaagacattgaatgacagctccaattgagtgatcttactgggggacctattattttcaagatatgtactatttacttaggttacagtatcattctatcatcaaatttcatgggtaatttttatgtacaaaagctgatagattctgagatgagatccagcctgaagccagtcaggatgaaatgataaccctgaacatgtgatgatgaaaatcaagtgaaatgaacactatggatagttcgatattttctcacccacacactaaatgtcaagggatgttttaaagaatgctgttctctgtgcagctagagtaggtttttaatatctgcccatgcttaacaaaaactgtcaatattgcaaccttaatgatagagtgaaatggaagatcgcatgtagcaatgcattattataatcactaacacatcaggtgaggtatacaaattaacaatctcacaggaatgaaaggattaaaatgactgtgtacattgaggtgcttttaactagttaactactaattgaaatagctagctgctgaatgggtaagttgtccttgttcagcctattgggttaccatgacaacagaatccttcatcttccataatatacactgaatttttagtacttataatttaagcatttgatttcctcatgaggtgactgaaaacatgcagtagcttgctaaccaaattttaaaaactgagtccataagaagatggtgcctagaattcaagtgaaaaagaaaaggcagattattagaaatatatccatgtcaaaattgagaaatgccatggcttgatttaggcaacaatgattaattgtacaaaattgaaggaagccattttatcttctatctcctattctattttctttaatttttctccactttccctgcaacttcaactgtgttaatttagcaaattactgtgttttaggacttatgcaggtgctatcaggacagcaatgagaaaggatgcccatttctcataagccaacatactagtggggaagcatcatttaaattaccatcttgggtaataaatacttaaataggtgtgccgtgggatgaccctgaaggagtgactaactctgcctctctttcctgactccctgaggatggctatgctggttgcgaattatggaggcctcttgaagagatcaccccacatcccagcaggaagactctcagtggcccctagtaacatccctctgctttctgttttattggatgtgaacacaaacaacacagtcattaccggttgtagcgggctgaatagtggcttcaaaaagatatgtccaagcttcaactcctggtgcctgagaatgtaaccttatttggaattagggtctttgcagatgtaattaagctaatgatcttaagatgatatcatctttgatttaagatgggttgtaaatctaatgatgagtgtccttataagggacagaaaaagagaagacatagagctacacagagagaagaaggccatgtgaagatagaggcagaggttagagctatgcagccccaagccacagaattccaagggtagccagcagctgccagaaggtaggagagagtcatgggacagattctccctcagagcctccagagtgaaccaaacctgccaacaccttggttttgggcttctggcctccagaactgtgagaaaaaaaatgtatgttgttttaagccacttggtttgtggtaatttgtaatggcagccccaggaaactaatacattggtcaatttaaaaaaatgaataaagaaaattgaaatcacctaaatgaaggtttgccattcagccacaacttgtaactggcgtgttcctctgaaggcaaattgaataaaagagcaaacacatattttgtcaaggctgacatgcatcgaaatatcacaagggcctcaagagggaagagaaatttgatttatgtcttcatgctagttgaaaatagtgtagccatggatgaagctggttgtcacagtcagccccacacatctgtttagaagcgttatggtctttggtggacaaagttaaatacaaatgtctgtgaaaatactgtagcaacagcttcaggaaataaaaatcccaccttaaactccccaaccccacaccaaacatacaagagactgaaatgtgtccatggtgcctgccagagatgacagaagtatcttctcccatgaatccaccccctccaaatctttctgtggctccaaatgccttaacctggcagcagactctagtggagggagccctgtgtcttgtgtggcctctgctgtgtgcctctgaacctggggcttaaccttgcaggacttccatttcttcattgataaaatgggaaataatatgaatcactatgggaaatgtactcaccagtccccataacagggggaggaagcagctttatttctcttccgtggttgctttgttttcttctgatacaacctgtcaattaggaaacatcgttttggctcttaccttaatgggtttgaggtcaagccaaatcatggtgagcttctagtaaacattctggacctttgacactcatcttcatggactatgtattgattgctatttttagtattgatggctaatatttgtggagcattcctgcactgcaggcactgtaccaagtatgtaatatatatttttggctgcataccttatagcaaccctgtgatgggggtagtgatgctctcattatctgcactttgcacataagcaaactgaggcttccagtgtttccctcattaactcaaggttccaggattattaaggaataggaattaaaagctgctagcctgcacttagattcgggtctgatggcttcagagctcaagctctcagccacacaaaacattatgccttatgtctgactttttaaatatgactgtccttgttatttcccctttaccttgattttttttccatttgttagttagttgtcctgttgtttcactaatatcttttaggtatttcatgaatttgggggaacaatgcataaaactaagtataggtgatgtaaggattattgagctaatgtaggtagacgccaacccattatctggctcactaaagatacacaatcaatacggttctcttggcttcctatgcaatgctcaccatcccctgtccccagttgttttcttctgcttctcaggcaatgacatgaattgattgtaaatgatttcccagaaaccacaacaataataatacgttgtatatgagtgttagttaaatgtataagatgaatcaaatttgtattaaaattatttctgtattaggtcttttataacttcaacttcattatctaagtacaaagtatatcaatcctctctaaaaaccttgtaaaagaattgttttgtgtgtgtggagttcaccctttgacaatgttaacatttcctttaagcctcagtttccttatctttaaaatggggctgataatagttacttcatggatttgtcgttataatttagtgataagcatatatatgaactccacacttgacacttctaaatgaagtgataacgtgaataaatatatacctctttccttcttcccctccctcttccctgagagggggtcttttttttgtttgtttttttacaaattgtttttaatctaaataagttaataggcagaaggaggaaggcttttcttcaggactgttttctattttttgagactaggaatagaaaggtggagcttggaataaaagaaggttatttaaaagtatcagagatgttgccttttaagttgtattcaaatgtgccatacttagtttgaggtttacatactaattactttgatctaataattagctgtcatataatgaattataaattgggagtttaaaaatgtgtgctgtgctgatctgaagtataatctctgccagtgtaggcaattgctgaggcctgggactggattctgaaacagatgcacattttaagaatagcgtcttaagggaggacttcaggtccataaaggctaaacccgaagcaggagcagtctctgtgtaggtgccagctttgtcaccgagctgcattcattttctctggtgattaggggccttcccaaagttaacctctagagaatatttagttacttcgttgggttttaattacttattggtctcaaccttaacatgaccttgactgtgtcattaaatagcatcttgcaatgaggtctttgggacatttttacaaacaggtggattacatcacaagtaaattgataaaacttcagtccaagaggagagttaatgtttctgtgttacggatcgtgttcattcccaagcaggatgtgtatgctgttcttactttagtaagtacagtccttggaacactttcctaccatttggataatcgattcaaattctagcctctgtgataaaatgctaacaattactgatttgggcaaagcacactgtttacatactctgtggaatacctcctctgacagccagcagtaacttaaaggcaaaggttccaatcagtggagctttgtcacacagagaagggagaaagatagaaaggaggattccaccttgctgcacatggtagaaaaagagatttctttacaaaaggaaaaaacagaaaaactttcttctttaccttagatttgctttttataactacaaagaagagattaaagcagtatacttgtacactgaagctatttttttaaatatcaatgtataatcacataagagagctagatgccaagaatgttacagcatacaggccaaggagtaagacgttatatttaaggttcactatgctgtacacagtttatttttctgtatatatttgaatcatagactattataccacaaaatagaattcaaatcattcattcattcattcattcattcttttagtatatattgaaaatgtattatgtgtcaggcattaccttgtttttattttttatttttatttatttatttatttttgagatggagtcttgctctgttgcccaggctgtagtgcagtgacatgatcttggttctgcaacctccgcctcctgggttcaagcgattctcccatctcagcctcctgagtagctgggattacaggcggtcgccaacatgccccattaatttttgcatttttagtagagatggggtttcaccattttgaccaggctgaactcaaactcctgacctcaggtaatccacccacctcacctcccaaagtgctgagatcacaggtatgagccaccacacccagcctattttttctttttaagtattatttttaattgacaaataataattgtatatatttatggggtacaatatgatgttttaatccatgtatacattgtggaatgatcaaatcagggtaattagcatacacttcacctgaaatgtttatcatttatttgtgggaaaacattcaaaataatctcttctagctattttcaaatatacaatatattattaacagcagtcaccttactgtgcagtaagacttttaatttcctcaagaaaggaaagctactttagaaaaaattaatattgtgtcagtgagattcctgcaggccagcagcctagggatcagcaaagaaatttacggggcagcagtgtgctgggagatacttggcctattccaaaggaaaaaaaatatctatttgtgatatgcaatttttttctttttgtgatatgtaatttttgattgttttatttctttctattatgccttgtgggaaaaaagggagagagagattgagatagagaaaataaagatagagagagacagatggagagagagaagaggagaaaaaactgaactagaaaatacatacactgaaaagtgaatcacttacaactgatatatattagaaataagtcaacaaatatttatagtgttcctatagtatgcacagtatgacgggactcatagctagtatgtaaactctacgtgttgtgtttagaaaatatgtgcaggctaataaattattaaagaaatactgaaatagttccagaaagtaacaatttgagttttaaatgttaaagatcttttaaaattgtattttgaccaacactgataataatattcacaggattacttggttctctatattaacagattgtgagtgtgctaaatcattttaaataattatacaatgcattaaaaattcagggtcttgagggtggtttgcttattttcagtgacagcttctatacccagtttggaaacactagtgtactccctacttgaccctgtgggtcatgtattgttatcctgatcattttaccaaacaaaaacatagggaacataagtaatctactggaagtcacacatctaagaagtggtaacctgtgtcttcagactgtgtaccacgtgggcattccactgtgccttgttgcccacaacacagatctgccaaaaagatctcccttttgataatggactgcaaatttgaaagaattattaaacagtgctatcttccagctgcattaggcagcgaagagcgtggaaaaagcatcccattgctagtccctgaatcacctgaatcatataatcttcctaggcctcactctccctgtttataaaataaggggtaataaaaccttccatctctcacagatgagtgttttagggacacattagatcacttatgagagaagctttatggtctttgcaagaaaagtacatggcaaaataacattttcccccatgatcgtctaatatatcataaaaaaaatgctggaaaggtaattaagtatgtggctttgacagacgtgttgaaaggaatgaaaaactgatgaaaataaagacagttgttatcttggtgactggaatggtattacttataaggacatttctaagtttcactaagacagttcattatgaaaaacaagatgggtatctatagttccattaattgtgttgtaagctaaaatccagattaatctaaaagtaaaatttgtaccataaaagatcagtggttggttcttattaaactgctacatcaggatcctacaacaaatgaaatatttgggaaagtccaggaatggaccagtgaaaatgattcaagaattaggaagcagaatctgttaaggaaaggttgaagggacaaaataaagtagaagataaagctgaaggatgagagaaatatgggaggcagatggcaactagaggatagaatgaaaagaaattggtttaaattatgaccagaggattataggtagtgcccaagggagaccgtgatgcttctgagagttgtaagctactggaatgtactattgattaaatttatgaaatctctttttttctggagatatattcaataataggccacctttccatctcagcaaattgctggaggctgtggataaaagggtacattctatcatatattgtagttatgccctaagataattaaatttggggacagagtacttcaatatgtgaagtctatccctagaagggctcctttatttcaggaccccaatcaaatgctactgggcatattaataggctcatgttccactttaaagaaaaaaaataccattactatttttcatagctccagaattctggctgccttagcattgacatcagagaaatctccctataatcagcacctgttatgacaaaatattagaggttgtaggattagccacactgtagcaccttatgaaacacctatgcaccccaaatggtaaagataattgaatgcctcctttaaaattatcaaaagcttataaaatgcagtaattatatactctctgaatatttaaaaatgattaatatgctttaaacacaccaatagttagggtaacctaataatttgtcataggctagaatattacataaacacagttattcagggtacattatatgctcgatgactgcttgaattctttaaggcatgtaaagcatcccagcttataatcttgcttttgttatttttgttaaattagcatgaaaaatatttgaaaatattagtttttgttggtgttaaggaaaagaataggtgagtatgaataatgccccatatctcttactgaagttcttactcttcattttaaccccagttttgcttctctagtcaactccagagcatccttacttagatgcctcaatatatcctggacccaatgtgatacccaatgtcccactttgtctagtgatgctaccatgattttttgacattatgtatgtttgaaatgttcttcccctaacactagctgtgcctgtcaaaagtcttacccatatttaagctccaattcagaaaatctttctccaatcctttcctcacccacaatttggtaagatagtttcccacctgagccacacccatgtcagcttgctagtgccctcttgttgtcacttatcagaatctggctgatgttttggttctctgtcttatctttaatccttctccttttgatcagaagcactttgaagatgttgatgtcttattcttgtcttctctgcaaaccctagttatcttgcttatgttgggtgcttactaaatatctattaagttggcatcgcctcctgcctcagttttatccatgtcgttggagtcctgtttcatgtattcaaactgaatgtttctggctatccccacttttgccattgtggtctggccttctcttggggatatgtggctgaattcctgccccagccacctcatctgagcctacatggcctccttggcagtttcaccttttcctgccaagctttggaagccctctttaaacaccagagttacaatttagcagcccaggaaatttttccaaccattggtttcattccattcccccaagtttgatttggggttcctagattcttatttgtttacacatagttgggtttagcctctctggctaattccatcattcattgcctgagctggacagctgttggcttcgttttccacttcccttctgcccaggaactggttcttggctgtacttcccttgcttttgttacagtccaaatacaagtctggccctccccatccagcatactccagatcctactagggttacagagctttgctgtcctccttaaagggagaggaattatggcccctgtgtaagtagcaagtcaccttcttacaccagtatccagagccttccataacttgctctcaccctgtctagacagcttctctgccatgtcctgtccaacggctccctccttgcagtgaggctgttcttactcttgaggacaacagactcagactgatcccccactggggttttgcttacactggggtggtccctcattcagaatatccacctccttactctcattttttttgtaacagttcctttaggtcctacttcaagatgtactctctctgtgatgctttcatgtgacagttcagatcatctgatttttaccccttcttatgcacacatagcacctatgaatttggccttgactcattgttatcctctgattgttctaggaatgggtgtatcatcttaccagttagcttataaaggtctgccaaggggggggattatgccataaacttcttatttgccattgcaccttgctcagaaaatacatacatatacacgtgtgtgtgtgtatgtatacatacacatacatatattgatatatgccaggcatgatgtaaaatgctgtacataaattatttaacctacataactagtgttgctgttacaggaaagggatccaaatccagactcacagagagggttcttagatcttgcacaagaaagaatttagggtgagtccatagagtaaagtgaaagcaagtttattaagaaagcaaaggaataagagagtggctgcttcatagacagagcagccctaagggctcttggttacccatttttatggttatttcctgatgatatgctaaacaaggggtggattattcatgccgcccttttttagaccatatagggtaacttcctgacgttgtcatggcatctgttaacggtcatggcactggtgggagtataacagtgaggacaactagaggtcactcttgtcaccatcttcgtcttggtgggctttggctggcttctttattgcaacctgttttatcagcaaggtctttatgacctgtatgttgtgccaacctcctatctcatcctgggacttagaatgctttaactgtcagggaatgcagtccagtaggtttcagcctcattttacccagctcctattcaagatggagttgctctggttcacgtgcctctgacactgctagataaaatataggatgcaaataatacatcctgtaatatcctaaaatattatcctaaaaattaatttttgtgtatctgatattcaaatttaactgaacctcctatattttaatttgataattctagcaatccttcatataacatttctgagaggtaggtatttcttatatacagagttttatagataaggaaactgaggctcagaggcattggataatttttccaaaattggacttcagatgaaatctgctggtctgcagaggcatatgctctctaagcattattcctggcttggtgaatgtgaagtaagatgctgcatactgtgacatggcattctttgggacagcctagattctatctgtttaaaggagtgaattacatggcctctgggtcatcttcagatctgctgctcctaagataaaagtcctatccaatagttggaaaatgcaatactgtgaatattatcttaatgtagggatggaactcttttgagcacaaaagcaaaatctgggccaaaagcctagtcactgtaagtactactggaagcagtgaagataaaatacattgtgcacgataaggtaccttttaaataatcttttaacagttttttgttttgcttaatatactcccctgtaaatattggtttcctttattagactattatagtaaaattaaattagcactttgcagaatatttttttcaaaaaaaaaaactactcatttcttacaataacattaaatttaattcaggctcccttgtctaaaagaaaatatctttgcatttagtggatctaattagcattacacagacctttcccattaagggaggggacttggaatattgtctttgaatagagaaattcatttacctattaatgaagaagaacaggacgaaagtctagggagctttacaagatagctttctccttcttttgtctttccctcctttctgttgggttaaggcagggatttggtggaaagctttgcatcatgttggtctgtggaaaccagatctaatgggagaaaatggatctgtagcctcttaaagtgagatacctatatattatctcagatataagcaacctaagataacattcctgacataatctgtctccaggaaccttagcaaaaccgcaaagtataaatgatgtggttttttggcctccttgtcccccattctgagccttgccccctattctgctgttctctttgccaatagttctcttgatgaattttcatcacgaaagtttcccgctttacccagccctgcctctaaagctccaaaaggagctcttatacccttcaaccgcaggacacacccccattgtcactatagttgatgttggtggagctgatgttctgtttgtttaaaatttgacttcctcccagacaacagatgcattgttcgttcattttaattggaaaagattttagggatgagggtagctgactctactcgcctgcagaatatggtttcacatagcgtattaaaacgagagagggagcagatgaagtatttggattggggcatctaggttagacatcttaaatttcttttggtactaaacgaagagaagtgcatgttctgtggcaatgcaaagattgtccttagatagaacagcgcttgaattctttccgggtgacctcaggcaagtttcataaactcaactcttcttttccttgtctaaaagattatgttgaatactgctacctttctgtgtttttgagaagattaagggaagtaacatgtcttggatctttttgaatctccataaatgacagctattactgttgtacctgttatatgtgtttgagatcaggtgcgccgttcatcccatcagctgttcgtacatagcttcaactcccccagggcacagcaactttgctttggcaataacattggtgactgtaatggtgcttcttgaattctgcaaagatctattcttcatatttttaatcattttttaaaaaatgatttatccctaattcatagaattaattgaagtggttttcatcgtacagaaagcttttgagttggcattttagctaattctgctcctgaaaggttaaagaaaaatatttgacagctttttttcccccccttttcatcttattgtccaaatgccccttaactcattcatacaaccaaagatgagagcatatgttgagttagtgtttcactttgtggccatattagtaccatctatttttgaaacaggtatgtccaggaatataaaatggaggttgaaacacaggtcttcaaacaggctactgacaagatgatggagatggtagaaaaggagtggggaatgcatatattttagtcctttgatagtctgtgatcttcactgaggtctgtgtggtaactatttataaattagaatatgtcttcaggggccacttcattttctaaacatgctgaagaacatcttcaaggattgaaaaaaagaaagaaaaatttaaaaagaatgattggtagaaaattaagtcattatctcagctggagggcagtattttgccttgagctgtgttttgaatagcctgtggaatttacttagattatttgagctagagatttgtaatataaaatgatatccctttgtatttatgtagaagctttcattttagaaatgctaactgctaaaaaaaaatgtaacatcctgtggcaagagaaaagatagaaatgattaaagcagtcaaagacaagttattgaaaaattaattaatatttgcaaattcttgataaccaagatgtcccagattctgttgtatgatatggacgttgtatagacgtgaagggttgggggacaagaaggagttagggctggatatgataataagtttcatcttcaatgtttcaaatattggtgactatcaatttaattttacactttctgtagtttgtattatcaacattcttgccaggacatcttaaggtaaaaagatgaaatgtacaaagccacacaacagatttcccactagtgtgttggcctggattggtagatatgaaaatattcctaaaaagccaaaaagtttgtctaggctcactagtgtcttaaaatagttgtctcatcagagacatctcttgtagtactagcttaaaaagagaaattataaagttccatagataagttagaaaagtaaacattcaattattcctacaaagcaccggtgcagctccaaatgctttacatgtatgaacatgttaatccctatagcagtctcctaagatggatacatgattgttgttttaagatggagaagcaggagcacagagaggttaagtcaattggctgtttttatagctaataacagtttcaggattcaaactcagcaagtctgattccaggttccatgctcttagccattattctctgctatttcttttctccttttcccagttattttcctctttctcctcctcctcctttgtttgctttcctgttttttttttccccattaaaggcatggtacttattcctaccaaaaaaatctaacaatctgtcctcccttgctccctccttccttccctcccttccttccttccagtcaaaaataagcagtctcatgtgaagggagaaggtggctgggtagggttaggtctgagctggaggaaggaagctacagagaggagcaaggactggtcatgtcaggagatgactgatgatatactgaatagtggaaatgtttttccccatgagaggagaaggatgtttcagatagaaaaggtaaaggcttgattgactcttgtgatactgggttagaattagaggtactggtatattctcaaagtatatattcagccatagaaataaatatataatagatacaatggtgtgtgcatatctgtgtgtatttatataaaagacattttatagctctgcccagtgagaagtcctgggaggagtggcacctcagtagcaatgagtatacctatagcacagcctgcagtcttaaaaaatactaagtccatgaaagtcaaagaggactgaagactgttttcctgattgaagaaaactaaagccttgtgaccactcagtgccacagatgatctcaggttgggttcttttactataaaggaccactagtcaaattttaaaaggtgtctctgagtgaaggatatatgagagttctttggtatacctcttgccatttttctgtgagtttgaaaatatgttctaataaaaactagaagaaacaaataataatcatggccagggtaatagagttgttaccctctagttctttttgtcaataaatttaaatttttggaattcagccaaatacccagaaccaaggattactaaactctactaatcatgattaaaatgtgtctctgttaattgcaaataatgagtctgaataatggtaatatttttctactctttttggggggaacatactttcatgcattgaaatatcatgcttttaagaaatgggctgtatttcagcaacctgtttctctgaactgcttttgttaaataatgtttctgaatgatactaactggagaggtttttagaacatagagtccaggtaattaagggaaaggtgcttttcttgccttgtagtaatttcaaatgtgagaagcatggcagaaataagatgtgcaaagccatataagagatttcttattagtgtatgtttacatatatagtagctataggaatcttcttatagctgaattttcttctcgtcactgactttcttttagagaaggccaaataccattacatttcttaaggatttttaattttatattaaattgtgtgtacttttacagtcctcctaaattcagatgaattcagtaaattctatttaatattctcacacagaaacctcgatctatagaaagagaggtatttaatcatattaacctggttattggtgaaatttcattacagtagatcccatgcactacttattctgttgcctaaaatatccactgttggactgttttacactttttaccattatttaaaaggtgctatgatcaatattcttgtaaacgaatctgcttttacttttttccccttagaacaaatttctagaagtagacttgcaggtcaaaggaatgcacatattttaggcttttgataaatgtcaccaaattatttgtagttgcacagactaaaatgtccccatccattttaactttttatttttaacatgaaaaaggctataatgtagcatatttagcataacaaaataaaaccttgagtttgagtatttcattctgtttttagaatgatgagtttattgaattcaggctgtaccatggtgtcttgagaacatagaatttctcatcctcagggtggtttcagagtatatggaattgtaagtgctggcccctgaatcatgtgctaaagggctaatatggaacgtgttcctccttcctttaagaaatgtttggtccttcctgccaattatttgcatttttgagggacaggacaaaaattggaggcaaaatttcactttttccccatgttaagccttttcctgccctatctaaagccaaatctaaacaaaggacaaatttgttcattgttccttaatagtggaataaaaacaagtttggccagcagtgataataaccctccattttactcaaagtctgctgtaaatccctcaccacttctctgagtcttctaaagactttcaggtctttaggtagtctgcctcccaccttgcttcatcctcaagaggttgactgtataggtctaaggatctccaagttctgacctttaccaataagtttatgctgtagacttggagagcatgcatactttcaacagtggtgtctcttttctaccatttaccttggattttttttttagaccaacagtgttcctaatgctagcttctattgctgctcctttttgatgtcattttgtcatgacaattttttgtttgctttttacaataagttgctgttccagggcagagatgaatttttttttcagtaagtcatgagtgtggtacatccactaaatccagttacacatgtaacagaatgtactattattattggcagtgacctcattgattaattacagcctgaccctcttggcaacttcctactgattttacttcttgagtgattagttccaacattgcttatgcagttgaagtaaaggaggcttacaataatagtcctactttggaacactctctgccctactgacattaattaacaaaacactccacagaggaaaatgggtatttattctgccttagatgaaaagagtaagagacttggtgcagaccattcatcagattggatgagaacaaaatcaaccattcttctgttagacatcagccagatgggtttgggtggagagaaggtagccaaagatctacaaaaaagcaaatagtatgtgacacatttcctacaaaatatgcttatctatagccagtccacattctgaatttagatgggaaggtgaattgcagccaagcctccctccaacagtttgggggaagatttctcttagggaattaatgaggaattatattaattagggtaaaaattaagctgtcgtaacaaagacactcccaaaatgcagcggcataatgaagacagacagtttatttctcattaatgtgataggtctgaggtgagagtacatgttgattgggtggcactattctgaataattaatcagagacaatgatttctttatggtgagccccactatctcactgggtattatctttgtctctgtagttgtagttgatgctgggtcataggcatgtccatgttccagctaataaaaaaggaaagaaaggaactccagggcacatggcttgacttttacattggaagtgacctggaagtcacattcctttggcctgaagtagccatacccatttgtaaaaaaaggctggaaaatgtgtgtggtttccagtgggatgaccatgatttcccattatcatgaaagaagaaaacagatatgggtgagcaagtggcagtcttcaccacagatccatgtgttatggcccttctttactactgaaaattttgtcaaaggacacatgactagcacttaaagccactccatatatatgtgttgaatgagttgcttcaagtatgaagaaatagagcaaatttcagtttacaaataccaagtcctgactgtatgtaaatacacactaaacagtttttcctcctaatttaatcatgctgcttacttaagcctgagtttgttcacttgctcagcaaagtggatatatcatatttgctttactcaactaagcttttttcttgattgagtttcggtggtgtttctctctcgctctcccccacaccccgccaccacacacacaacataaatagcattctttcccttcagatctcaataacagagatatgacacacataactgaagcctaattgaggctgttcatattgtgaggctgctgtctacttctatatcaagcactgtttgtcataaagggatgcttaaatacaggaaatcaatcttgtacccacagcaagtacacagaacactaggctgctactcatgtaatgagtaaaccaatgtaaatggatgtccagatgctcatctttagccaaaacagcctaaattaaatttcagtagatttttaagttggaacaaatttctctccttatagaacttcacctttttcctcactgtattcttttggtgtcactgaatgtcattccaataagttttctccacgaaactgctagaattcaagttctatgcgtgattcaagtactcagtaggtaaaggctgacacagagaattttcctagtccagggaagttactcataagtggtataatcatggtataagcagtatactgtagaaatataggggaggcacagattaattcaaaatgagtaagtctggaaaaggctacttgagagaaggaagatttgaacttggcctttcaaactttagttggactcaacaattgcaggaaggctgcgtctgacagaaagaagggctgagctacagagatggagaagtttaggaaaacagcacctggctgtgtttggaaagggtgggagggtaagtaagaataaacaacatgagtaggtagaggccaaattgtgggtggaccaaaaagcatctgagaaattatgtgaaaggaagaggtcaggctctcaaaaatacagtttctcataataaaagcaaactcagattttagttaattatcactacctctgtcaaaccctaaaaatagctgaccaaatgtaaagaggctagagaaacaagtacttaaaaactaatgtttattgattcatagaaaaatcctctactttgtaatctagttgagtcaggtacaagtgtttcagtaagcaagggtttattgcctattcattatatgctgggcatagtttgctgatgctgaggaacagaaaagaaggagatatgtgtagcaggcatttgttatttttgcctacattttttacttttcctcattttttgtaaacaactctctgtctcagtatttgtggtcagatgagctgagattttaacacaaagcctaaactgtactaagtcgattacaagaaaaaatggattagaaatggatgagccaacacagacccattttcaccactggacagacaattcaaacacaagcctgatcagtctgacctctgtgtgtgttctcagtcaaataaaaaatagggcaaactaatggcctggagggtttatgatggggtctcaaaaatgctagctcaaataaaggactctttgaaataattctatttccaagccaaatataaatttacctgccttaggaacaaagcaataaaacccatttaaagtacttaagatggccctctggctttgaaaatgtggctttggtgacctcatctcctcttaggctgaagtttaatatccctcttctctgaagtaagaccaggatagctgatggttcttaatgggtccctgcatctgccacaaatgagctttctgcattggattggtttcctcggtacagtccttacttatatgtagcactgtgagaaaagaacactgagggagagatgattttggaagtatttaggaacactgtgggatgtatttatatatttctgttaatccaaagagtatattagtttaacataaacaaccacatcactcacagcagaaccatagcaaataggacacttagtgtgttaattactaaactcttaatctccttattttacctgtaatgttttctttcagaaaatgttttcatgtctaatgcagtttcactattgcagagactaggaggaataccaagtcaatttttgctgaactataagcataccagctattttacaaagctcatgacagaagcttaaaatatttttactcccaaaaaggcatagaattttatcattttagctgcaggcagaatagcaagaatctagcttttgacatacgaattgttgcaaagaaaaatgaacattttctatctttatttctttggatctgtcttgtttcaacagtagttaaactgaaagggccgactacctaggcatttattcagtattcattcttgagtttgagggatatagaataaataagacacatagtggatacatgactttgtgcatttgtcaaaacccaaaacactgtataacacgaagaatgaactctaatgtaaaccatggactttagttaaaaataatatatcaatattggttcatagttgtgacacatgttaataaaacgagaaacgatgaggtgggggtggtggatggagtatataggaactctgtaacttatgctcagtttttctgtaaacctagaagtgttctcaaaaatgagggatagtattaggggaatgaaaaaaaggcacagtctcattaggtttgcaaacatgtaacagttttaaacttatctaatcactaactcttttgtaaacaaagatgttgcccaacaatgtataggaaatctcctaattgtctttttttttttttttttttttgagatagagtctcgctctgtcacccaggctggaatgccatggcacaatcttggcttactgcaacctccacctcccaggttcaagcaattctcctgcctcagcctcctgagtagctaggattacaagcgcgtgccaccacagctggctaatatttgtatttttagtagagatgggatttcaccgtgttggtcaggctggtctcaaattcctgacctcatgatctgcctggctcgccctcccaaagtgctgggattacaggcgtgagccaccacacctggccctaattgtctttttaggagtataaatcactttttgatactgactaaaacaaactatgtttaaaaacatttattacatttataagataactgaaaatttgagcactaatggatagttgatgatattaaggaattctatttctttaggtatttaaagatatggtgcatattttatttctattgactttattttttcaattgtggtaaaatccataacataaaatttaccattttaaccattttaagtataaaattcagtagtattacgtatattcacattgttgtacaatcttcagaactgttttcattttgcaaaactgaaaccctatactcgttaaacagctccccattcttccctcccccaggcccctgacaactttctttttctatgaatttgaatttgactgtcctaagtaccccatgttagtggactcatacagcatttgtctttttgtagctagcttatttctgttagcataatgtcctcaaggtttatccatgttgtatgtgtcggaatttccttccttttaaagattgactagtattccattgtgtgtgtgcataccacatttttttttatccattcatctgtccatagacacttgggttgcttctacattttgattattgtgaataatgctgctgtgaacatgggtgaaatctctttgagtctctgcttctaattcttttgggcatatacccagagtggagtttctggatcatatggtaattttattgaggaattaccatatttttttctatagcagctgtgccattttacattcctatctgcagtgcacgtaacagttgtcacatgccattttcttttttttttttaatattagccatcctaatgaatgtgaggtggtctaatcccatttttggaggacctactgattgaaagatcctgagctaagctgtactgggctctgagagtattttccttatagtcagttggctggtcaataattatccatggcatcaactaataatcaagtgccccctatatcttctaccttctagaagggtaactaacataaatctaagagtctgcagcactgaccttgttgcaaaatatagtactctgtttcacaagacttcacatgaaaggagtcccaagattatgagcagatactatttaaaatgtatttgctaatctcttatcggaatgcatgccaatataacatatgattccattgcctggctaggccaggaaagtctattgaaacaaaaaattataatgaggtatggcaaatttttgttataaagcgttatttcagtcacatatgttcccacttcttgtttggggtgccagaaacacagtatctctactctacactgcacacatgcttgcaacaaaacatgagaagcaaggaccccttctccctgaccctcctttttcccatctgtaaacagggacatgtgtcatggtgggaggtgtggcaccagaaccagagtcaggacttaaggggctgcaggtgagagtgcaagaccttgtgatatccatcctgtaacgtacactgctgcataagagaataatttgatggctgggcagtggtgcatgcctgtaatcccagtactttgggaggccgaggccggcagatcacccaaggtcaggagttcgagagcagcctgggcaacatggagaaaccctgtctctactaaaattacaaaaattatctggacatgctggtgggctcctgtaatcccagctactcaggaggctaaggcaggagaatcactgaacccaggaggtggatgttgcagtgagccaagattgcaccactgcataccaccctgagtgacagagtgagactgcatctcaaaacaaaaacaaagagaagaacttgatgtaggctcctttgttccacagtcttctgaaccatgaaacaaaggccatttttcattccagtgtatgaccttagtcattcatttatttattcaatcagcctgctagacttttattgaacacatcttttcagtacctagtatgtgtcaagcactgtgctggatacaggggatacaatggtgaaaagcacaatttagtctctgaactcatgacacttagggtctgttggtatttattaattattcgtaactcggaggcctttagtcaaaagactgcctatatgttttgcagtagtaccgttgtaaaatccagcacccacccccatttcctacccttgatatttgctgccaaaatccacaatatgtttcagaatgctttctattttagtagtacatctaaatgggcatgaggtagattgcttacgggagaaaaaaatgtatagtatggttagcttaaaataaagtattagaaaaattgtacctattaaggtgctcattcatatatatgaatacatatagactcatgaataaatgtgtgtgtgtgtgtgtgtgtgtgtgtgtatcctttggagctaggaataagaataatcatgatgcccatgtgtactccacacaaaccatgtgcatgccttatttttcactacctccttttcctttgtaagatgaaagcttctgtttggcagggataatgggatttcagattgatgtgagcctctcagctgaatctgacttcaacaccacatgagttcaggagaggatgatggaggcagagtctcttgtgaagcaagtatggaggaggagtccacatccccatcaaggcttctcagagagtcctcccctccccagcctgtgtgtcctcttggcttcaccttagattgcatttctgagaaggctggaatctgttgaattgagcacagggatgtgggcaacggaacaaaaagtgttttatttatttcctgacaggcttttaacaggctgtggttataatgggagagaaatgtattctgtccacaacacaaattgcttttcttcccgaacattatggtagtacttcctggcccaggatttccccacttgttgaatttggtctttctttgattggtctatgaactaagaaagaaaagaacaagacctttgtaactcacataatgaagtaataattaagtcctttataaaggcaagcttattcccacatcttattccaaggtacaggacatgctttctcattaggaaatattttaagtattcattggtagtgtatcaggcattagacagaataaataaatatgacctcatttatatggagtttcaccttcacaactgacacctgataggcatgttctccagtgccattcatgttttgcgggaatagtgttggtcaggtgcctgagactaactctcccaaccttctgtcgtgctgtcatgcttgggatccgggttcctgggacagaaagggtaattgacaccttttcttgactaacctggaacaagagagtacattgggcaatgtttgtgagtatggctcgtacaagtttggaggggattggagtgacagagagctagttggatcaagaaagtttatgaaagtgatgtttccaaggtcatccttatcaataaataactcactcaggacaaccacttttttggttaagaaatacactacatttttgcatatgttttccttttaagaattcttggggcgagcctactcgtgttgggtaggcaccccatttttgagggcttcaccattgcgttatctgtagactctgactacccagtcccactttctgaagaaccctgacatcagctccagaatttctatataggatgagttcagagaagcagtctgattagaagggactccagggagctgtcttgaagccacatttgtagagtcaacacaattttatgttctgatggttggtacattcaaggacactcctggggctgatggaggttatgggtgctgtactctggtgaaggtctctttcagatcaagtggcctgcagatacagtgctccaggccaccaccattctccctttgatgacagagagaactatctctctgttgaccatctcatgcacagacaatgcaagagagtaaaccatgggtacagtgagaatgagcatttttctccattctgttgaagcagatagcaggctcattgttatccaattataagaacaacaaacctccttcatactggctgtgtttattaaaaaagttttgactaaataatctctgtcaggcttcaattttggcagacaccgtctatcatagtaccaccaagtgctggtttcctgcttctctcagtaaggccaatggaattctggtgagcttaaatgcagttactgtgtagctctctcatagtgggtccacccagtgttactaagagtttgtgaatttcttttctacttgaatgaccagcattcctgtggattttgttctctttcctttctagtttaactcttcttttcttctctgtacctatctcttatttcatccctttcatcatctccacagaccccaccctcaatatcctttctccatatccctgtctcattgtattctccttcatgtactaatggcttgcacactgtattaatgaattagcccaattgttgaaaatgtgtctgatgtcacaaataactgagtcatttataggtcatattctggttggaaacaactctaggggaattttcttatgactgtattagctgtagcttaactgatatccttgacataattatctgtcacatcttttcaaagtaaatgagtactcctaccttgttttttggccaacattttttgtgtaccttacaagtgacaggcattttctaattctcatagcaacccataggacatcattattcttgattcatagctgaggaaatggaaaatcagagtttagatcttttgcccagattcagagaaccaatgaacggacagtcacgatgtaaacttcaggctctgtggctccagccaagctctaccatgtgcattattcaggccccttcatggctggggagctcttggctcttggagccttagaccatttctcaggcagctcttctttggctgcttgtgtggagagcagcagtaagaggtttgccatattccttgcctccctgggagggtgcagaaaatgttgaccacaggtacattctgaaaaatgtaggcttttctctggaactggcttctattacatattattaataacagtatacaaaatgaaatgacccagggatgcatgactagtctcgagtttataactaagttcaacatccagactgatatgaatcaaaattagaaaagcctttgggaaaattttgaaatagcagagtagaaaaatgcatcagtaatccatgggaatacaaaagttctcattcatttaaaagatctgtatttcattttaagtttcttaagagaacagtctctgcaggatatctttttctttgaagcttatggttggagaataattttgaaatccatattgaagattctgatggggattggggaatgatcaaacatgaacttgtggtatacaatgttgctggctttttcttttttaaaatggttttcttaggtatgagaagaacatgattttgtctgtaccaggtgggtgttcacccagaagtcatgtgcataatcagacacatagtacttaactttgtatatcacataaaagcataaaagtttccacaggattttaaaaatttattttcatgtatataaatatatatgtatacatatatatatatatattttttttttttttgagacaaagtctcactctgtcactcaggctggagtacagtgtcacaatctcagcttatttcagccttgtatcctgggctcaagcaatcttcctgcctcagtctcccaattagctgggactataggtgcatgccaccatgcccagctaattaacaaatttttttagagatgaggtctcactatgttgcccgggctgatcccgaattcctggtcccaccttggcctctcaaagtgtttggattacaggtatgagccttcatgcccagcttccacagagttttgaaggtatcatttgagcctcacagaattttatgagtgagagagtatggatgcatttatcctcattttataaatgtgaataccaaggctcagaaaggttatgtaacttgtaagatattcagctagaaagtggcaggaacaatggaagcctgatctttagaggctttagaggattatacacagtgtaattggcaagttggactttggagttagtctgtagttgaggcctggctcttttatttactaactggatatcattggtcaggtagaagctttctgtccctcagtttctcctatgtgatgatgacaatgataatgattaagacctgctataactgttcttaagattaagtgaggtagtggccaaaagtgctcagcacagatcctagtgcaaaaataaatactcaatgaatgtcagctcctctcataatcgttttgactcccagcttgtgccctttgctccatgctaccctgctctgctggtcatagaagaagcttctgagaatacagcctgtctggactgcatcagatctggggataagaacagctctctgctatttctcagcctctctaatgagtgttactattcaggggagtacacttcttgctcaagggaattgtattagtccatttcatgctgctgataaagacatacccaagactgagtaatttatgaagaaagaggtttaattgactcacagttttgcatggctggggaggcctcaggaaacttacaatcattgtggaaggaagcaaacacgtccttcttcacatggtggcagcaaggagaagtacagaatgaagtggggggtgggggaaccccttataaaaccaccagatcttgggagaactatcatgagaacaacatggaggtaactgccctcatgattcaatgacctcctactaggttcctcccacgacatgagaggattatgggaactacagttcaagacgacatttaggcagagacacagccaaaccatatcagacacagccaagccatatcagaaattgtctcacatcctaggaagaaagatgagtgggaggatcagacattccaagcaccaacccccatcattatcccagccaaatatccaatcaaactgttgtttgtaacatgaattaatgattgcagagattaaagttcacattctagactggtttcctaagaaaatagtttcatcagtaaaaattatatcttaattatacagccagaatatcttatttacttgacctcaccagagaggaggtactccatacataggggagttgtctagacaaccaaaatgtacaccttttaggagcttagacttcaaagtacttcttttgattataagcttataatactccctatgccttttaaaactgatcacaattaaattgaaaggtttagtgatgactgcaggttatcatataaaagatctatgatcacacagtgctgtaatgaagtgtcttttgtgacactttaggcacagttgagggagataggttgttggctgtcaccattaaatgctctctatatgtctatacatgctctctttgcatcccctctatgatctgtgccttttgatttcttgtatctgtttttttctttgtatagctgtcctctttatctcttattcttagttatcacttactgtagtcagaacctgcttctggcactcccatgcaatccactgttgtgaatggagaagctgtaaaatcatagttgctaaaattatgccttaaaaaagtgtatagagacccctagtgaggcccagtcagcctttcctctgagttaagtgcataaacttctaattactcctgatttacagctacatttgagatggttgctgccctcaaggaagttaaaaatcagttggggagagaagacttacgtttctacaaatgaaaaaggacaagtatgtttataataaagtgcttagtcctgatagtaagtgcaataggaatttagattaagtgaagtcattagagaagcttcatagaataagagcaacttacactagaactcaaagaaatgcttagaattgtacattaactcatttattcattcatttgttcatttgttaattgagtgtctactatttgccaggatgtgttgtaagtgcagaagatacaataaataagccaatcaaggtttgtgctttgatggaacatgtattgtagtaagggtagtaagatcatagacaagaaaattttaaaaagaaataataacatttcagagagtgaaaactcctggaaaaaaaataagacagaaaagtaggaaaaagaatgatagagactagttgattgagggcatcagtgactactttagagaagatggttggggaaggcaccttctctaaagattaaaggtaagatttcagttgaaattgaatggtgagaaggatctagctctgggaagaatggaggaacagagatccagtaaaaggaacagaaatgcaaaggtcttgaggctggagcaaacttacggaccagagcaaaggcctctgagacaggagtcgggggagagatgtcatcagagaaggaggaagggatggagcatatgggagtttagattttattataagagcaacaagaagccagaagaaggttttttttttttaagtggggagtgatatgagtcaactgttttttaaaagattatctagctgctatgggaggaggaagtgaaggtgcaggcaggagtggagatgagagtaaaaacaggcaaaaaacattccatacaggcatcatcaaattaaaaagcataggctgccaggtgcagtgactcacccctgtaatcccggcactttgcgaagctgaggcgggcagatcacctgaggtcaggagtttgagaccagcctggtcaacatggtgaaacactgtctctactaaaaaatacaaaaatacgaatatactgtctctactaaaagtacaaaaattagctgagtgtggtggcaggtgcctgtaatcccagctacttgggaggctgaggcaggagaatcacttcaacccaggagatggaggttgcagtgagccgaggtcgcacaccactgcactccagcctggatgaccgagtaagactgtgtctcaaaaaccaaagcatacactacaaggcatgcgtgtggtagggaggtagtctgactaggaggaggggattgatgaaggacataaagttggaggtagaggcataaatgtgtggaattttagaatggaacctattatatacagaataagctttgtagctcagaggtctacttctccgtttgtccttctgcaccagagtttagggttgaaataaacatcattcgttccaaggcttgattccctctgaaagttcacattaaaaaaaatagcagtgcagccaggtcctgatttcaaaatggctagtacttaacatttactgccgtgtgccttttgtgtatttggggctttggaagactgatgttccagccaggtgtttagaacatacttgaatctgcctctccctccgtaagaggaaggtgacatttattgattttacattgtgggcacggcatagtcctaactacttacgtgtattaccttaattaatttttttttttttgagatggagtttagctcttgtcatccaggccagagtgcaatggcgcaatctcggctcactgcaacctccgcctccagggttcaagcagttctcctgcctcagcctcctgagtagctgggattacaggtgtctgccaccacgcccggctaatttttgtatttttagtagaaggtttagggttttcagtagagggtttacttcagagtttcaccatgttggccaggctggtcttgaacttctgacctcaggtgatccgcccacctgggcctaccagagtgctgggattacaggtgtgagccacatcacctggcctaccttatttaatttttacatctatttttgtcccaattttgctgatggggagacaggaacagattggccggttagcctgttcaagatgacagatgatgagaagtggtgccagaatttgaacccaggcagtttgacttttgagtctatgctactaagtgttctatctccctgcagcttcattggctgatgccatgttcctgaaagaatctttagggatacaaatgtggctgaagcatgcagcaggtcacagaggcactgatgatccacctactcagtgcttcctgaaaggacttacccttctgcctgtttgctttgttgttaaacagctactgtaatccactccagcctgaaagtggctgcttcattgatatctagatagtagatgtgtattacgtattaggtttattccaagaagaataaagtagggcaagctttttgtgtcctgtgaacaaagaatttggtggaatcaggattggtaaatttttatttcatgtatttgttaggcctaccagatatcagccaaaaactaaagtagtcatcctcacagcttctacatgcttctcaacaaagatttaatagcctcatgcatatggaaggttcatattgcaaagacttcattactttcagtatgcatactgtgagatagggtgataaatcatttaacccaaactttactaatcagaataaatgtacagaagtcatgtggtgatggcttatgttttctcagtaattcctgaagtttggtaagcttcactgggcttccaagtcattagagagaattacagaatttcttcaactctctgccactgccccctctacactgtggctgctattcctgtcatgtgttgccctaagaaaagcatttctaggggcgtgcaatttcatagtaacttctgcttcttttggagaaactagattgtatatgaataaggccaaaagccttaactcaccaaagcatagatgagggaagaataatgaattgtgttcatctgtaattctcaagattaattgcttgattatttcaataaaagatttttgcttttaattaaagccctatgaaacaaaattatgccttgatttcagcaaggtactggaatttcacaagttccacatgtctcacaatttcgattttgaaatttagatttcatttcaatcattagatatttggttttatgtctttgtcttctgtcagagccctcacttgggtgtgcttctgacccatttaattctttatgcttccatgtcttgcttcatctttggatggtcacaacacttaatatcaggctttgtatagagtaggtgtctattacatgttcgtgaaattgaaaagctgtaaacagtccaccagattgctcttaagtaactagcattggaaatatagtaccaaaaaccaaaaagaacaacaacttgtgcttttaaaatacgttcttcttctctgacttttagccattccaggatctctgttttcactgggactggagtcttatgttctggatcctgaaaacaaactgggatacatattttatctttcccttcatgctcagtccaaaataccctaccaactacttatattcaaaatgctgtaatgtgcaccataattttcctgtgaagcgggcaccaacacagctttcatttgcactgaaatggatgtcacatgcatattcttgaggtcctcctcaacatttggatgtgttcaagggttctgttttcttttgtgagtgcccatcagctatgctaattagttttctgtattaccaaacaggagggaacttcttgaaagtttacccatagtaatactgctgagcagatagcaaaatatgcaaaaggtgctttgtaaaaggtagatactaatatatatggaccagtttgctgagtagagattattttcttctttttaattatgactttgtactcagggaatatggaataaccttataaacttaattatatttaattagtccttacttccttctacgtctacagtagtaggctgtgaattgtgaagaaataaatgacacaaggattatcttttctgcaggtgattagttgataatcctccctgggtagtctccagtctcacagattatcccctaggccaactcatgctatcctgcatgaccacattactcttccaaatacagaatttccttcccttaaactagatatgggtattttggcactcactgcttttagtaattgaccctaatgtctatacacatcctgcgtcaccttactctgtctatactcatcctgtatcactttgccctgtatatacccatcctgtatcactttgccctgctcccaacagcagctttggcttccaagagggctggtctttgctcctctgagccccttcctggcatggcacagctacatctcagccaaaccaaggaaggagtgatatttagtaatgactggagaaaagaattcaagatcaggcaggtctgggttcatctgtgggctctgctaggcattagctaagtgcccatgaacaaattatttaaccattttgagttatgtttcctcatctgtaaatataatgccttctgcgtgatgcttatgaagataaaaacaagatatgtacaggaagcattaggcagtgcctggcctaggacaggtgctgttctcagtgtataaatctaaaacagatttgtgtcctgatgaagccttccccagtaactgcaccatcattactgtgtccctcctcctgcacttagaatctcagtcacagacttcctaccaggcaggagcatggatttcatcttcttttgaattcctacacactacctactctgacagacaagaaggacttgacaaatccttattgtctcttgtgcaagtgtcaaacgcaaccttccctcttatcattgaggctataaatgggcagcacatgtgtcagaggaggccatgatggagcctcaccctggatgacgatccttctgtcacttccaggtgggctgcagtgtgatggggccaatgggcatttatcccacaggcacccactctaactcagccatgaacatagaagaacagtgatttgcaagacagacatgacctctgccctaggataagtaattatttggtggggaaaaggtccttatataagcatacacattagtatataatggggaaaacaaggggcttccataagaaagagttaaggagagagaggactaatatggtttagaaattcagggaaatttcctctgagagggacaaatggaataataatagttaaaatcacttacagattactttgtgtactcttacagatatcacaaaattaaacctcaagataatgcaataaaatagctatgttttttttttttttttttttttttacaaatgagatttggggagagtaattcttccccaagtcaatccctatttattggcagagactggtctgctgccaaaaatgttcccagtcttctgcccctggttcagtgacggatgtgtaatactcctggcgagggcccctttgccagattgcttgcaagcatctgatttcagaatgggtgaccagtcagaaaatgtgcttgaatgtggcagacagcaaattcagtgagcacagaatgtcatcctttaaccaaaaactcatgttctctcctcatttgcaagctgggcaagttagggtattataaagcttctgtgtttttccatcattagacagagtgtcaacaattggtgagtgagccctagtctttgactccctcctgatttatattatactatttctgttaagtcaggaaactatgccagtgttttctccatcaaactagatatgcattttctgttacggcagtgtttgtgcctaatgcttctgtcacaggagtttccttatggggttttacttctaaagaattactagggagaaaattctgttgtcatttggcatgaagccacaccatcccttccaggttgttggtttgcaagcatccctccttctgcctgaaggagagtgcagcatgcatgaccttctaggagaatggagacttccccaggttagggagctggcaccctttagacagtacctgggctttgcctgcagctcaggcatgctggagaggtgggctgctttggggctgcttctgctctcccacctcgtctttccagctcaccgattagcaaatgtcttcacttgctgaagatggtaatagcaatgataaaagcactctcatttgttgagtgctgtctcagtgtcagtcattctgctaacttttttatgtgtgtggtttcatttagtcctcaccactattttctgaggtcgctataattaaatcacatcttagaattcaggaagctgagacaaaatggccaactgacttgttcaaggcacaaaatcagtaaactgtggaactagcacttaaagctggttctgtcaaaatcacaagcctgtttcttaactactttgtataggctttggagcagatgagggtaggaagtgcccacacctcacttccattttgtatcatctgacccactatgggtcccctgcccaagacagtgaaggtggctgaggggcaatggtcattaccatgactctgacatttggatagatttcagaggagctttagtgcctccctgcatcttcatcttctctgttccacaccacctcgccattagccatgaatagatatcactaaccatcacaactcgtggatgtccttagtgttcacctaaatagcctatcctaatgtttgtacccttgattgaaagattccagttggaaaaccaactcatattttggtagatttaagtcttctatgatggtttgaaattttcattggtgatcagtgaaaatattcactggaatctaccttatgatatgatttcccttgtagcctctcatctcttcatgcatcaccctgataggtaaagtagcctggctgctgaaagaggagactaaggaaggggggtggggggaaatgacttgcccaaagtcatgcagttagtggacttcatctgtaatccatctgattaaagaaacatgacaacaattacattgatttttttaaatgaacttttagacaaattttaatatagcatttggttaataacagaaaattttgccttctgaggggactttatctgccttccctcactgctttaaactagctttaaagcaaatgtttggcagtttcttaaatatatgaagggataattgttgttttgctgttcagttgtaaaacaaattaaccaagtagaactatactttaaacgtgtattttgtagtaggataaacaattcaaatgctgagcatccttgtgaataccatgtaattaaaattgtccccatattttatgtgctatatgatattataatctgttctttccacatgagtcacattatttagtcataaaattactaccaatttctcatttacctttaaaacggaaaaggcaacactttacttttcttgctgatttattttgaggccagttttctatatacctttaatattaccactttcccctttctataaccctttccaatttcctttgtcccgataagactttgagctggcatctatcatatctacctaaatttccttagatttgtgatcaagtaaatagagtaccttccatttcttgaacttttttttttaatcttaaaatgaaatactacaaataccatgacatctaacactgtggttgagggtttaagtatgttcaggaaattaaaagctaggatccctgcaggaaccataagattatgatacacggataagtgtaacaagtttcacatgtatctgaaagagctgagtcatcactgcctttttgttgtgaacaagtatcaattctctaaccttagaatcttcaaacattaatttaatgcattttatttccatttctagtgagttgtttgaggcaatattacacacatgagttctgatgggttttatgttacgaggatattgatacttgtcaatgctcaggtaatttacttttcgttttcaactccttatggaatgttatgctgttagttgttacttttcaaccttgtgttcatgctttcatattgcaattactcagtttttaatataaaactaaatggaaaaacctgcttgggtgtgaaatatgtgagtttgcaggttatatattttctgcttgtttcttcttcttgcatcatgctccagaatttcttcaggcactctttctcaaccgcacaatgaaacaagatatagcttttagaatgggctacctgattgtatattagtattcctgggtaattatgcctatgagaatcagagaactgataaaaacctaataaatagtgagataatattctccatgaaaatatagtcctgaattcagcaataataataataataataataatactcctcacatgcaacacagcaatattccactgcagccatcaatgcctagggaacagcatctctgtctggaaggttggaaggaacttcaaggagtcaccaggaaacattgagaacctccctttgcaggggcctgctgggaagacttaggaagcatactggtgccatgcccaggcttctggaggctacagtatcatggcacagagcaagaaagagagaacctttggataaacaggagtctttctcagagatactcccgaattttgcatttctgtggccatggtttatgaatgctgctgtttatgaatgcagctgtttcaaacgctctttacataaattttgattattatactcttgagcatttacaaagcaaagaggtgatttcttttttactgatatttattcatgatttctgaataattaactgtgggtggttcagttgtcagaactctagtgaacttggacacttttgctccattgtgtctctgtgccacttctgtagcagaagcaaacttttaagtcattccttgataacagcaaagtgcttacagaggctcaaaatggaggaggggagtctctgactagtatttagtatgaatgtgggttaaaacctgtttagaatttgcaagtggctatatctaattttctggtgtctttgacagtctgtgtatatttgatgtaatgcacattagtttgcatgttagcctatgttttaaatgtgtactatacaaatccctggtggaatttgaatttggattcagtttttgaatttatgaaaaacaagtataccaaaagctcattgtagctcaggtattgtctaagctgaattaagtgctcagcaaaataatgtattttggtatcaaagcaagttttgctattaaaaataacctaaagatcaaatatgaaagtgaaaaccaacaactatcaacctgcaaataaaataattttcatcttgtgaataagagagtaaactagaaggatataatatgaaagtgtgtgtgtgtgtctatgatttaagcatatcatttcttattgatgtagtttcagttatagtctacaaataggcttggaagctgtatcatatattagcattttgtggagttcagacattggataatttacataaaactacttgaaataggcagactaaaactattttttgttagtaagtaaaattaagatttatttattaagtttgaaacttcgtcaataattctagaaataaattcccattcaggcttctcatttttgtacattgatactgcacaaagcatttttaagcagattccttttgagttttttttcttcataatacaaacttaagtaagtcgatattatgtgaaaatttaaggtaatttaattttgattaaggtgacatttactagtgcacttgtaaaagggatttgctaactgaattaaatgattaaactaaattagcaataaaattcacatgagaaggggtgtttcagttacccttgcagaaaatttttattgagcatctagccgatgtatagctttcagtcatatgcaaatttttcttaaggacatttatttctttttaaattttttagacacaaccaggactttgtcaagtaattctaataaattctacacaggccttcaaacaggtttgtgttttatctgaaaattctttgataatgtttatttatgttgtaatactcatttttaaagtattaagctgtactccttaaaaactgtctttaagttgaaccagttgtatagtttagaccaatatttaggcccaacttccttttttagactttcaagtgtcttttttcattttctccttcgaagttacaggcttcagagatccctccttttaccttcaaaatctcagtttaagcctcttgtcctcaggggagctttctctggcatctcagatcagcttgggttcctttttatatgatcccaaagcatccaccgtttcttttttgcacttatcataattgaaatgatatagtttaaatatttctttagtgttttcttcccctcactcctacaagcttcacagaataaagaccatgttcatcctgctcacttacagtgcctggcacacagtaggcacttagacatttgtggaagggatgattgagtgcataaagactgcagcaggctgaagcctctgcctcctccctgtgagatgcttttgtctgaacccatttagtgtttataggagaatatccctaagcccaagattaaggatgaattaaacccagtttctttctttgaccttgaatctttcatttgtcctattctgctggccgttttattgtctctgatcttcaaaaacatttttccctagttcagggaaaaatgagtaaacagccatacaagaagattattaagtgactatcttctctctatttatttatttatttaagagacagagtctcactctgtcacccaggctggagtgcagtgacaatcatagctcactgcagccttgacctcctgggctcaagtgatcctccatcctcagcctcctgagtacctgggactgcaccatcttgcctggctaatttctttttttcttacagagacagggtctcgtgatgtcacccaagctgatctcaaactactgagctcaagctcctccttcctctgactcctccttccaaattgttgggattgcaggcatgagccactatgcccagcattttttgaaacagggttttgctttgtctcccaggctagaatacagtggtgtgaccttggcccactgcaacctccacctcccgggttcaagcgattcttgtgcctcagcatcccaagttggtggaactacgggcccagctaacttttgtatttttagtagagacagggttttgccatgttagccaggctggtcttgaactcctggcctcaagagatccgtctgctttaaactcccaaagtgctgggattgcaggcatgaaccactgtaccctggcccacccttctatttcttgatatactccagtggtataggaattatagggggagagaggaaatcaaattgcaatgatctcaatggaggttattcagaaaatattctaaaaaggccaaaaaggccaaacatctatacaacttataagaaagaagaatggagaagttagttgatactgtggaagaaaacttgacaagcacatttgttttcaccgcatacccctttagtaagtttcttaacctttttgtgcttcagtttcttgaccttccaaatgaggggagaacagtaggacctacctaatagcaaccccattaggattaaaggagacaataagataatacataaacagtgcttaattaatgtagtactaggcacattgggaacatttaataactattttattgtctccctatatttagagttaacccagagtgatagcatctctgtgtttttctttcctttttttacttgtaatagtgtttttccatacaaagccatttcagttttatactacacattttgtctctttgtcccagaataactacagaaatgacaattggtcacttttctctccacctcacccctgcgaaaatctcccactttgcaaactgactcagggcccatgcccaataatgagaatgagaagaaatcattttatcagttttgctggtagatttttttctcaattagaagaataagagaatgttggagaattcagcaggacttagaatgctggttcattggggaacatagatacagcagagtaagaaaaattggaagaaataagaactgggacttctttatctgaataaagccaggatttctatgcaattcaatcagaagaccattttttaaaatgtggggaattgaattgataaagattgattgaatagaagtaacacaaattgtgctggagaaaaatgatggtgttctctctgctggagccaaacctcttgctcacttaaattctagtgtggggacagtttatactgtactgcaacatataattaaataaaatacgtttcaaggaagtgctgtgtgaagtttgcaggtgggaacgatggcagtggatggaggaatcaggagaagcttcctgaaagatagtggcattcaggacaggtctggaaggatggatgcagttttgacatgtggaggtagaaccctgaaaggatacttcaggcacagggaatggggtgagcaaaggcacaagggtgggaagatgtgtgggaaatggtgatagctaattcagtatgcatgtgtgctatgccagtgttgggaggaaaagactgagtaatgcagcataataggtaggacgggatcgtagagtaacccttctttttctacctcactgaaaatgtatcctaaatttggaatcatttaagttctttaaaaccttcttggattctaagatcagagtttcctatagatcatgttcaagtattcaatgggctccatatgtgcagctttttcattctgtccatcctaatattgtttagaataatgcctctttccctcctttggtcgagaagactttggaactcaccagatgaggccattcacaggtgtgacttccagcctcttgcttctcctcatttgtagaaatacaaatcactctaccttctatttaggacttaagaaaaatagagttcattttaaaatgtcatttttgagaatgagactattgagttcaaaagtaattaaatattttttttaaaaaaaactaagtttaaaaataacacaattagcctctaaaccaaattcagattaatttaaaagtgattagaacgaaaactggttctgacacttgttttaatcgctgtttttaagtatttatttttaaaatcacatgagcatatatgtatgcatatttaataacccaccaactctcttctctctttattcctctgggattaccctccaaaccccatcttctagcctctgttttggagctggcctaggaaaatgaggaagctgaatccctaagagctctcctcatcacggtatcaggcaactgtactgggaagctgatcattggtgttttgggagtaaaataagtgatagaggatgtgtgttgttcatttgcttgccttttaaagtgtacagttcagtgatttttagtttattcacagaattgtgcatctgtcaccacaattttaggacatgttatagccccaaaagcaaacattttacccattatcagtcacttcccattttcctttaatccccccagacttcagcaaccatatgtctattttctgtctctgtacatttgcctactgtggacatttcatataaatggaatcatgtaatatataatcttatatgaccagcttcttttacttagcatgttttcaagggtcattaatattgcagagtgtatcggtatttcattctttcatattgtagaataatattccatggtatagatataccatgttttatttattaattcatcagttaatggatattgggactgtttccatgtttttttggctatgataaataatactgctatgaacattcatgtacaagtttttgtgtgaatacatattttcatttgtcttaggaatatacataggtatggaattgctaggtcatatagttatactatattaacattctaagtaactgccagactattttgcaaaggtgctggaccttcttgcatttcctgagcaatgtacgagggttccatttcccaacatttttatcaacacttgtcattatctgtttattttgattctagccatcctactatgttcaatgtgttcttattttggttttgattttgatttctcacatggctaatggtgttgtgtatcttttcatgtgctattcacatcctttgcccactttttgattaggttgtttgtcattttattattaagatatagccgctcatttggtattctggatagaaattcttcgtatgatttatgatttccaaattatttctcctgatcaatgcattgtcttttcactttcttgatgatcttatttgaagaaaaaaagttttacaattgtgatgaaatccaatttatcttctttcttttctcacgtgtgttttttgtgtcatacctaagaagtctttgcttctaactcaaggtcacaaagatttaatcttatattttcttctaaaagttacatcgttcttacatttagatctatgattcattttgaatcaattattttgtataatatgagtagagatccaacttcattcatttttttatggctatccagttgtcctagcactatatgttatgtctgtacaatatattccattcctgctgaattgtcttagcacctttgttgaaatcatgtgactataaatgtaagcatttatttctaaagtctgtctcattggactatgtgtctattctagtgctagtacaaaattgtttggattattgtagctttactgtaagttttgaaatcaaaatgaatgactcaatcaactttattcttttttaagattgtttgggctattttgttccttgcattttcatgtgaattttagaatcaacttgttaatttcttttcttcttattatttttatttacttaatttttttgagacagagtttcggtcttgttgcccaggctggagtgcagtggcacgatcttcgctcactgcaacctccgcctcctgggttcaagcaattctcccgcctcagcctcccaagtagctggggttacaggcacccaccaccacgcctggctaatttttgtatttttagtggagacagggtttcaccatgttggccaggctggtctggaacacctgacctcaggtgatccacccacctcagcctcccgaagtgctgggattacaggcgtaagccaccgcgcctgacctagttcttttagttatgatgttaggttgtcaattttagatctttcctgctttctcttgtgggcatttagtgctataaatttccctctatgcactgctttaaatgtgtgccagagattctggtatgttgtgtctttgttctcattggtttcaaagaacatctttatttctgccttcatttcattatgtacccagtagtcattcaggagcaggttgttcagtttccatgtagttgagtggttttgagtgagtttcttaatcatgagttctagtttgattgcactgtggtctgagagacagtttgttataatttcttttcttttacatttgctgaggagtgctttacttccaactacgtggtcaattttggaataagtgtgatgtggtgctgagaagaatgtatattctgttgatttggggtggagagttctgtagatgtctattaggtccacttggtgcagagctgagttcaattcctgggtatccttgttaactttctgtctcattgatctgtctaatgttgacagtggggtgttaaaatctcccattgttattgtgtgagagtctaagtctctttgtaggtctctaaagacttgctttatgaatctgggtgctcctgtattgggtgcatatatatttaggatagttagctcttcttgttgaattgatccctttaccattatgtaatggccttctttgtctcttttgatctttgttggtttaaagtttgttttatcagagactgggattggaacccctgctttttttttgttttccatttgcttggtacatcttcctccgtccctttattttgagcctgtgtgtgtctctgcagtgagatgggtctcctgaatacgggacactgatgggtcttgactctttatccaatttgccagtctgtgtcctttaattggagcatttagcccatttacatttaaggttaatattgttatgtgtgaatttgatccatcattatgatgttagctggttattttgctcgttagttgatgcagtttcttcctagaatcgatggtctttacaatttggcatgtttttgcagtagctggtaccggttgttcctttccatgtttagtgcttccttcaggagctcttgtaaggcaggcctggtggtgacaaaatctctcagcatttgtttttctgtaaaggattttatttctccttcacttgtgagcttattttggctggatatgaaattctgggttgaaaattcttttctttaagaatgttgaatattgggcctcactctctactggcttgtagagtttctgccgagagatctgctgttagtctgatgggcttccgtttgtcggtaacccccacctttctctctggctgcccttaacattttttccttcatttcaactttggtgaatctgacaattatgtatcttggggttgctcttcttgaggagtatctttgtggcattctctgtatttcctgaatttgaatgttggcctgccttgctaggttggggaagttctcctggataatatcctgtagagtgttttccaacttggttccattttccttgtcactttcaggtacaccagtcagacgtatatttggtcttttcacatagtcttatatttcttggaggctttgttcatttctttttactcttttttctctaaacttctcttctcgtttcatttcattcatttgatcttccatcactgataccctttcttccacttgatcaaattagctactgaagctcatgcattcatcacgtagttctcatgccatggttttcagctccatctggtcatttaaggtcttctgtacgctgtttattctagttagccattcgtctaatctttcttcaaggtttttagcttctttgagatgggttcgaacttccccctttagcttggagaagtttgttattaccaatcgtctgaagccttcttctctcaactcgtcaaagtcattctctgtcccactttgttccgttgctggaggagctgtgtttctttggaggagaagaggcactctgatttttagaattatcaggttttctgctctggtttctccccatctttatggttttatctacctttggtctttgatgatggtgacgtacagatggggttttggtgtggatgtcctttctgtttgttagttttccttctaactgtcaggaccttcagctgcaggtctgttggagtttgctggaggaccactccagaccttgtttgcccgggtgtcaccagcggagcctgcagaacagcaaatattgcagaaaggcaaatgttgctgcccaatccttcctctggatgcttcatctcagaggggcacccggctctatgaggtgtcagtcagcccctactggggggtgtctcccagttaggctactcgggcatcagggcccacttgaggaggcagtctgtccgttctcagatctcaaactccatgctgggagaaccactactctcttcaaagctatcagacaaggacgtttaagtctgcagaagtttctgctgccttttgttcagctatgccctgcccccagaggtggagtctgcagaagcaggcaggcctccatgagctgcggtgggctccacccagttcgagcttcccagccactttgtttacctactcaagcctcagcaatggtggatgcccctcccccagccttgctgccttgcagtttgatctcagactgctgtgctagcggtgagcgaggcgccatgggtgtagaaccctctgagccaggcgcgggatacaatctcctggtgtgccatttgctaagaccgttggaaaagtgcagtattaggggtgggagtgtcccgattttccagataccatctgtcatggctttccttggctaggaaagggaattccctgaccccttgcacttccagggtgaggcaatgccccgccctgcttcggctcacactctgtgggctgcacccactgtccgacaagccccagtgagatgaacccagtacctcagctggaaatgcagaaatcacccgtcttttgcgtgactcacgcttggagctgtagactggagctgttcctattcggccatcttggaaccccctctggaatggctctttaaattttatttttggatgtttcattgctaatgcatataaatacatttattttttatactttgagctcataccctgcaaccttgctgaacccatttattagctccaacatttctttgtgtattcctaagggtcttctatatacaaaatcatgttatctacacatggaaatagtgctagtttttcctttccaacttgattttttttttctttttcttatttaattgccctagatagaacttccaatagaaatctgagtcaaagcagcaagagcatacacccttttcttattcttgatctcaggaacaatggattaagtattttaccactaagtataatttagctgtgcgttttttatggatgccctttttcaagttgagaaagttctcttctattctgatttgtttcatgttttaatcctgaaagggttgttagatttcatcaaactttttctgagtctatcaggatggtcatgcggttttgtcttttattctattgaaatcatgcatcatattaattgatttgtagatgttaagccaactttgtatttgtgggagaaagcccaattaaccatgttgtataaccttttttattctttgctggattcagtttgctagtatttgttgataacttttgcatatatattcataagagatataacttttgcatatatattcataagagatattgatctttggttttcctttcttgtgatgattttggtatcaggataaaactgtccttatagaatgaattgagaaatgttctcttctcccctatattttggaagagtttgtgaagaattggtattaattcatttgtaaatttgttccaattcaccagcgaagccacctggaattggtcttttatctgtgggaagattttttgttttgcttttaattattaattcattctctgtacttccaatatgcctattcagatttactgtttctccctgagtcaagtttggtattttccttctaggatttttttcattttttctaagttatccaatttgttgtaatatagttattcataatatgtccctatgatctcttttatttttgtaaagttaatagtcgtttctcatttctgattttagcaatttgagtcccctctcttctttttcttgatcactctagctcaattttgtcaaatttgttgagctttttaaaaaaaacacttttagttttgttgacttctttttttctatttcattgatttccaccaccacctttcttctacttgctttaggtttaatttgctcttcctttttcactggaagtttaggttattgatttggtttttataatacattttataaatttatagctattaaaaaagtcatttatagctatcagttttcctctaagcattgctttactgcatctcataagttgtggggtacatctatgttatgcttttattttcatttatttcaaagtatttctaatttctcttagtatttctacctacattgacccattgattatttaggagtgtgttgtttaattttcacatatatgagatttttaaaaatgtacttttgctattaatttctaattttattccactgttacaagggaacacactctgtataattccaatctttttaaatttattaaggattgttctatggcctaatagatggtctatcctgaagaatgttccatgtgcacttgagaaaaatacgtgctctgttgccactgaatatagtgttatgtatttttgtctttggtctagttggcttagagcattgttcaagtcttctattttatggttgatcttttgcatagttgttccatggcacatgtactttcatgtagaaatatcaatagtataaatcttgtgctgatttaagccctgtgcttgaaaacattttacctttctccccagtagctaactgtagcaataatcttgattttttttaaccaaatttcagtcaaaccgtcttctaagctaattagggaaacttgttttaatttattaagtacattctcattcacacttattcttccattattaaaaaaaattatatttttaattgatgattaagactactgggcttattcctatcaaagactcttttatttgatttttttaaagttatttcttttatgattatcttaattcagactgctgtaacggaatactctgatgtgggtgacttaagcaacatttatttctcaccatttaaggctggaagagtctgggaattctaaagtcaaggagccagcagatctggtgtctggaaggggcacttttcctggattgcagagagctgtctttttgttatgtcctcacatgacagagcagagagagaagaagcaagctctctcatgtctcttcttatatcagcactaatcccatcatgcaggctccactctaattacctcccagaggcctcattttaaactatcatggtattaaagattagagtttcaacatacaaattttggggttgggagggacacaaacatgcaatccatacaatcaccatcccaaatcaaggctgatcttgaaaactccctccttaaattttgattccaaaatgtaactctgcctttatcgtgatcacgtgtctccttcccagtcagccaaggggaaatagttacatatgctctgggttgatcaatgaatcaagagtatccaaacagataaattgaaggagtaggagaattatttatattatgcagaaggtggggagaaggaaaaaagagttttaagaaggtctttgcaaaacaactatttccagatggacaaaatcgctagcactttttgcttatccttaaggcttgtatttcatccccagctcctcctccttgagatgttaaagcttattcaactagatcaattttttggaggagttggagaaaatcaagtgccccacaaagatgcttggcataaacttcactgtgtgatctggctcacttcttccaatgccaaatgctgctgcaacatcactaggttccacagcacatgcagctcatggccatcttgtttcttttagcattaatgatcaggattgttcttctacttgttattttattgtaaagtcttgttcttgtaatccgttctgttctttgaatgttgtgattcctaaggcctgttatttgaattgcttgaattcgtatattaagaatggcattaaaattgtatatgcttgtaataaaagccaacctcaatcaatgaatattcacagtgttgtttttcacgccacgatcagcggagccctttatcagaaacccctaggatgcgtgtttaaaaatcagattttggcacagtggctgtagatagtggctcaggaatctacattttaacaacccacgtaattcgaatgcattgacatgtttagatccactgatttaggggcttgttaagtaggtagtccattgtagatgcaaattcttatccattagcccctaggtaattttcccccagcaccttaaaaaatgtggtgaactggcctagccaacatggtgaaaccccgtctctactaaaaatacaaaaattatccaggcatggtggtgcgcctgtaatcccagctagtcgggagactgaggcagaagaatcgcttgaatctaggaaatgaaggttgcagtgagcccatatcatgccactggactccagcataggcaagagcaagactccatctcaaaaaaaaaaatggtggaacataattatgaaagacttcccaagattaatgcagttaattctcttagtaataaaattatttttgtactaaatagtatttattgattataaacaataatcccaataataccttgctaagtaattctttggaggcagtaaagtgcatacaatactgtgtttgtacaagcaaatagagagacagagggtgagatcattgttgagtaagatttgattgtgaatccatcattgctgcttcctcagccttgacttctggggagcatctgaggttttcccttatgataagaaacaagattgctatgtatatttatatatcaactgtctagctgaagcgtcacacatcagaagtcatgcatgacctgttttcatgacattttaggaagaagtagtggaaaaccagctaaaagattaggaaagagggcttttcaattgcacggtcacagagagttctcatttgtgctctagtactttcttcgtaaagccccaaaagttaattaaaaagaatttaaatcttctgcctgaaatgatgctcttcttccctgagactccctataagacacttggctgccaaaggagcctcatgtctacctatgctgtgtgaacaagcttcctcttaaagaattatgaccctactcctgggtggttccatgacaatatatcagcccctgaccacgagatcccccagagaagcatcccagcaagcttggattcaaggcacttcccataacaaggctgactccagtgatgtctctgaatgtcttttaccctctgctcttgaaatccttggcgttcatctctgatgttgtcttaaaagcttagaaaataaaccaaatgcaaacactttctatcatgctgacctgccatagtcccatgttgctacatgttgctacatgttgctacattagtcaaatctgactaaatgttgtagatgaagaaggtatgcttcccccagtgacctgtgagcttactgaagacaagggccatgtcttactcattttagcattttcagtcttcctcacaccacttgcttttctcactctcctctcttgcctcctctaatatcttaatgttcaacacatagcagtactcatactatctatatgctattaagttagaattgcattgaattgacttgaggaactggtcttaaatcagttagattagcggaggatatgtcaactcgagtttttgttatatatactgaaaagagaatggaaatatgcatgttgatgttatatgaaagcaagatagttcatatttttatttgctgccttagaaagaatactaaatggtgtgggttttttaattataacatttagggtgtaacagaatttgtattgcctgctttaaaatatttaaacagtggctgggcatggtgtctcatacctgtaatcccagcactttgggaggccaaggcgggtggatcacgaggtcaggagatcgagaccatcctggctaacatggtgaaaccccgtctctactaaaaatacaaaaaattagctgggcattgaggcgggtgcctgtagtcccagctactcgggaggctgaggcaggagaatggcgtgaacccgggaggcagagcttgcggtgagctgagatcgcaccactgcactccaacctggatgacaaagcgagactctgcctcaaagaaaaaaaaaattaaaatcgcttaccccgtataacagatatttatgaaactatttttttgtggccagcattatgctagatacaaatacaaatggatacatagacaaacaaaatatgacctctgctcccagggaactcagaggcaaaaagctattacaatgcaaagacagttttggaatcatgcacactactatgggagcagttcaagaaagtaactaagccctactggagtcagggaaagcttctcagagaagcccttgaaagtgatgacacctgcctgtggttgtgtagtattttgccggatgaagagcaagaagaaaaacattcctttgcagaggtaggtacatgaacacagagatgggtgatgtctgacggacttaggaagccggttaaagttggaaccatggatttgacagtggagaaattagcaggaaaaaaacttagaacttgtctgggtcagatcctaaagggcctggcatgtttagactaaggacacttttctctactctgatgctaggaggggtgcactgaatgtttgaaaatggacttgcaatacagaaagacaaccttggcaaatgtgagaattggcaggtggcgaaattcaagggcctttgctagtgatccatgtggaaggcaatggtggcctgaattaaagtctaataaggtggtagagagaaataactccaaaaatagcaattagatacaatcagtgggaccatagactgctgggctgtggatttagagagagaggaaatgtcagagtctggcttgggggtgttttagtttgctggggctgctacaaaaagcaccacaaactgagtgacttaaacagcagaaatttgttgtcttacagttctggaggccagaattctgaaatcaatgttttggcagggtggccttcttctgaggactctgagagacgatctgttcaaagctgctcttcttggcttgaagatttctattgttatcgtatgtctcttcacatcaccttcctctatgcatttctgtctctgtatccagattttccccttttattagaacaccagtaatattggattagagcctaccctaatgacctcattttaatttgataacctctgtagagaccatgtctccaaataagacacaatttaacccatcatggtgggtgtagggccattccctgagacagagaacacgagaaaaggagatttgatggatgctggggcaagaggatgaaattggtttcatgctatgctgcccatgccacatttttgttaaatttattatagtattatggcccaataactgcttgcttttgtgacttttatgttatgcctatgcaacaactctctctctgggttcctcttgctttattggtttagtcttctgacagtgcctggaggagtggggctctgaagaaaccatgggctgtccatcttatacactggctgtcagatcctatagcctggaaggcattctgtttggatgacattaatccatgtttcaactccccctgcccaagacagtggttgttatcatcaagaatgacacctgaggcctgcaacaccagcctctagaagctctccacaatcatactgtcagctggagcacccaacaaagctcacaccgatggcccagagagcaaagatgttactgtcaaatttagcagctacatacacacagatgccacactgatgactctttatttccccaaagttgtcattggctatggctatttgatgttttatggggtgaggtagggtgggcagattgtcagcccccaaatcaggaaaccaagtatctgtccttcaacttttttttttttttgaacaggatagtcaatattggccaagtgctaagacacacttagctaaccccaggcctgagatttctctcatttgtcactttgaaacactgggtcctattgaaggcaaagatgaattgtgacccagagaggagaatcacattggacagggtgacttcctgggtttaattaaagtactgaaattaatgagtattgtaagtgacttgccaaattgcctgacaaaattatttccacagataactccttgttttcagaaaaatgcaagagagtagccagaactttgaagtgaaccaaacaaatgacatcctaatggaggattagctggaggatgcctcaggtttggaacgtgaccaagtattactctggaaaactccctttattgcagcccctggagcagccccaaagcctgagtgaatttatctaaggttgtttttctcctcagtttaagaaaggcactggaattatatttgtctaaattattattgttgaaagttaattttaaagaaagataattgagataatagtttcaaaagttgagatttactttgctagcctgatttaattccctgatttaatcaggggatttagagataaccacctgggactttttaggtgagagagatccaaaaaataatttaatgtaccaattttttagctaagcagaaagactatttttttagatcaagaaaaagggaatttgaaattggcgtagcgtatctctttttttttttttcccttcaaaaaataaccttgatgcttttcttagtgagttcatttataaaagagcccagtggcatctcttcctgatagttgcatgggtcttttcggggggcacttattgtgttccagaagacactcaagtgtatccagaatgaactgggggagtaatcttagaattttgtcttgatggagaaatggagagggttttcatgagaaacttgaataattgtggagaggtttagattttctccctaaaccaacaaagagttaaggaaagcctagagtaagtgagatggctgtcacagggctgtcagggcagatatcctccgctccattggatctgccagctattaagcttgcttattccacttctcatgaactatgcatggtgcttgttctgctatggagggagcccccatcattaatactctccaacccagtaagagccatttgatataatgacactgaatttacccagtgatatccttaagaaaaaatgagtgaattctattaatggagctgtaacattgttgaaataggcatagacttcctcattctgtgaattttaatcagcctacaaatccccatttattagttatgagtaatctatgaatgtcttactttttaaaggccttcagagaaaattaaatgttgtctaatacttggggtcttctttgatatgtgtgtaactcatgttaatattaatgaatgttcgtcgctgattaataagagggagacctctttatataaaggttagtaagaaagacacagagcagtgatttcagtgtctctctatgagcaaataaggtcaatagcttgattcataggtgaaggttctatcgcatcagggaagataaatacaatctaaggatgtatgactttatgacgggctggggaaggatggataaaggcagctgcctcctctgaagttctccttatttaacagttcatagagtggaaggcagtcttttgtgaaagtgtttcctgggatttaaacttttatcatataatatggctcctaaatcttttggaatttatagttggatggggtagagagaggggaagggagagggatagagatgtccccttaggaaaataatttattaataataaataaaaggatgaagtcataaaagatgtgagctgaggagaagctgtggtttgagagccagggaaagacagtgattctagtctcacctttgtaaaaggaatttactctctttagacgttccttagcaataacatgagacacttgggcaggttcccttgaaaggcccacttcctctaacagtcagtgattaccgtgtagaaagcagagtgcatgccattgataaatagggtgatggcattaaaaggatgagttgacattaatcatgaagggattacaggaaaaggtacaatatgaacatctttgtgagtgagcaaggctgtgcagaggtgacagagcccatgactggagcgtggggctttgaagccaggagacaggtctgagtcagagcttgacacctactgtgcgacctcagaaatgttgactcgcccagccaccatttcctcatttgacacacaggtcagtatagtcttcctcactgggttgttttatgggatagttcagataccggatgcctaagacatagcatgatgtctgaccataatgggccatgagcgacagggcctttactactgagtaatgcacatgtgcactgaccctttggtatatttagcaaatagttcctgaaatcattgtttaagtaacttttagaatgtaaattttgtcttatgttcactaggggagcttgctatttcaaaggaatcttacttgactctcttcataaggcctttttataatgttaattacctccttataatttatctggtttattaagtttagcttctgttcttcgtgttttcctaaagtggagcaaacctgaaagcttactaatatcttactccattcacatttgcccttttttgtgagcagctatgataatatgtgatgactgacttcaagaaaaatgctctgccctcctctcttgaaacattaaactaggggaagcttttcttccagctattattctcataggttgaatggtctttaaattgcaattgacagagtgcttagtgaaatgctatatttaggaactattgtgtacctatgtctattatctgtgtttccttttcttttccaaaaggcggtgtttccatggaaaaagcgcatttgttgcttaggagattgtccactcttgtctttttgcttatccttcccatttagccccagacaggtttgtaatatcattcacagttgctgtggagactattatgatgtcatgtgtggggagctattatttaaggtgatgacttggcagctggatcttctgaaagaagaagggtgcatgcacgtgtgtgcacaggcacacgtgcactcatgcacacacacacactcacacacacacactgcaggacttcttccttgaaatgaccctatcacagactttttgaagggagtagtgcattaagctttcttttcataatgtggtagaacttatcttctgctcttaagcagcccagcttttcagtcattcatgattaaaacagtgacaagagaaagaaggaagtacaacctttcttatatgagataccaactaaaactgcagcactctctagcagggccaactaactcatagtatacactgagatctttccctgcaagttgatcattctttattaatcagtgcaactggaaataaatcaagatatagtagcagtgggaaaattcagttactcataactaagctagaaatatcattttactaaagggaaactgaaagaagaagaggtgactgacattttatcaagctctttctatgtgctaagcagtggatatctctgcctgggatcatctgcctcttctctgttggcactattacctctccttcccctacctttttttttttttttttttctttttaagagactaggtctcacactgttcacccaggctgctaggctggagtatggcctcaaactcctgggctcaagcaatcctcctgcctcgcctcagccttccaagtagctaggactataggcacgtgccaccacatccagataatttttaaattctttgtagagattgattctcactatgttgcccaggctggtctcaaactcttggtctcaagcaatcctcctgcctcagcctcccaaagttctgggattataggtgtgagccaatgtgtccaacctccttccccttcttcagcaccaacctataaatatgcctgtctctcctactatgcttgcttcccaccatcatctaaatcagactcctgccccatgtctctcattccattttgtgccaagtgtcttgaaataatagtctactgttcccaaacaacatgtacatcagaattcaccagaggagcctattaaaatacatatttgtaggtctccattcagaggggttgattcagaagattcagggtgtgacccaaatctttgttttttttagcaagctctctgggtgattctggtgtgcgctcagatattggacagtaattggtactcatttcttaattcctctcatcttaatcactcatcagtccttctccatctggcttctacctctcttgtgtgggtgaaaatgcttttgccaggatcgcatggccctccctacctgctgaatgaaatggcatgtgtgttcactgtagaacactagatgtggctggccactcccactttggaattccttgccccttgatgcctgtgacactgtgctctcttaatcagccctttggtctctttgatgattccaattcctcatcctactctgtaactgttggttttccccaggataccatgctcagccctctaattttatttccctacagaccaagcaatttcatccattcctgtagcttaactaccacatatctgttgatggcacccacaggtacttacaactttgactgtgtcttacctaagcttcagattcatagatatctctgtgtgctgagtatatgtgtgtctggatgccctgtcagctccttaggctcagcttgtccaaaaccaaacttgttgtcttctcactaaaccttccacagtatgttttcccccaacggagatcccactgtcaaccaagctaaaaacctgaagccatcctcctctaatttttctcacttccaacatcaaagaattatcaaacccttccaattttcctcctaaatatttcttggatgtgttttctcctctgtgtctcagcttcagatcctcatcaccccttgtgacagccttctggcaggttctcccaggtatatagcagtaatttatgttctcacccacccctattgaatgcttaactccatgaatttagaaagtatggcttcttcatgccatattctcagctagtagcagcattcatggtaggtgatcaatagagttagataaatgaaagcatgaaccatctagctcacagcttttttggaaattattatttacaaatacaacatataaagcagtgagcttaagggctaacatgtttaaaatgtgaattgccagcaaccatattggtattggtattaagtcaagaattttgatatttatttccctccttcaggtcttcagcaccaaactaggtcagctggaatcttctctcacactgagagggtggctattttgtttaaaagtgatctagctctagttttactgctataaatttgaactttacagtgagttcctcagacttgtgtattctcccctgacccattcaggttattggtgaattataggcattgtcagcatggtttgattcttctctgtcaaaaagggtcaccatgacagtcttctcactgagtctctgatttgtcttttggatctttcagaatggagggtgatatggtttggctgtgtgttcccacccagatctcatctagaactgtaatccccaggtgttgagggagggagctggtgggaggtgtttggatcatgggggtggtttttcccatgcctttctcatgatagtgagtgagttctcatgacatctgatggttttataaagggctcttccccctttgctttctgtctctcctgctaccatgtaagacgtgcctttcttccccttcgccttctgccatgatcacaagtttcctgaggtctccccagccatgcagaactgtgagtcaattaaacccgttttctttataaattacccagtgtcaggtatttctttatagcaatgccaaaatgaactaatacagaggattaattgctacaataaaatatgaggaaattaaaacctataattctttttttcctcagtaaaccagagacaagcagaaagtggagctcagagcactgagcgccttgtccagtgagccagtgacttgggaaaatggagagcttctgtgttcttcgatattatggaagccactgagcttccctttgcctctatgtctccctctgtaaagctgccagcttttctggcccttcactggatagctgtacaatgtataaagagcatttgtagtttcttggaggaaatatgtcagcttaaataagtggttcttgatgtagccagggtgataggtaacatttggaagtctgtgtttacagttactgttttaaggattatatttgtagtatttttctttgcttcagccactccttctaaaagatcatcaacacagaacatctgtgaagacttgtgggatagtttgctgcacaacctgccacatactaaatacagccattctagcaagaccttgcctatccatgctaatgaggactaggcacagtatggataatttaaatctgcaggaaaatataaaaatctagagtcactcagtattttttatctttcctgctgtcaaaccagcagtcatttaaatttcacatccccttgtttcccaggatgctttcatgaaaggcactaatgagaggcaaaatggccgagaggcagacgggttactggaaaaggagctgtatgcagtgaggggatgagcaaggcaacaactggataatcaccacctgaaaatcggcttcaaaaagcatttgttgaactcgacctgactgctcctgaagattaggcagtcacttctcttctgcaggcagaaggtgaggcctccttggggccaggtcctgttcagaggcatatgaaaggagaggagttaagaaggtaaacaaggcaaggcagtacacacattcccacagtggaactcagcccctgaccagttcctaagggaagttccgtgtgctgcaggttcaatggcaggaggcagagaggcattgatggaattccaccttctggctagtaaatttgcttgtccagatgtcacctgagatgtatcatcagaggttaattcctgttgcagccttaggtcagaagggaagtgcctctcttcactcctcagtctttggagaaacacatcttagagtgtgagttacagtcactgcccctaacaaagtggctcatgtgctatggaacattgcccctgatccttgttctcatcacagttctccttattttgtacctgctacctttgtggataataattaactacaatcatggtgttataatttactgtgtttatttgataagtggtatgttcctggttcttgatttttcttttattctctaatgctctatgacataggtgtgggttgactgtcaccaactctgtttatttatgcataaatggctttgcaaacaaaaggaacttttcacttacaagaggacttcaactgaggaactttgaatctcttgtgagtcagtaattttttaaatagaaaagacagctttcacagccttgatataagggagtcctagtttcacttgggctcagtcttttttttttatctgatggatgtccccagataacagaaaatgtgatggttatgtcttccaggccagcatcagccaaatgtgttgtcagagagtgactttaagaacattattttgtttgccaacatcctaaaaattaggacgatgatgtgaactttacaaatgtcaataagtgggggtcagcataatctagtagactgttgactagttccacagtgtgtccttcattctctgtgtcctcaaattcagaggactgacacggggattgggataaaaaagcaaattttttagcatatggatgacaaacagtcaacacctctttttaaacagtacattgatcaacaaaccgtgtctaccaggctcttgctcatcctgccacttatgggtcaattggaggcaaaggatagaaggagaaatgtatcacttcataaatatgaatctgatcattgtcaaccccctttacaatgatgttgttttaaaagtgattttcaataagtgaagttaacagaaaaagtaaaattgagcatgtcagggttcagttaggttcatcttctgcctgcctgtcattatttttacttgaggatagaaagattaatgtatctgttgtctctatgtactgagaactgtgctaagtgctgtggatacagatattaaatgaacagttccaagcacagactgatacatgagtatgtgctgatcatggtatgcacataacttttcagtccttatgacaaggaagtgagacacctctgtccactgctgactagaaggttatgttataagcagcgatcttctagactacagcagccctacacagagattcagaaatgcagagatttttgcagtgagttattaaatgggtagcatcccaaacacaacagacaggaactaacatgatagactctgtgttgaggttctgacctaccaggatttcttctggccattttggatcccagcctattctttatagcttttgggaacccaaatcccccttttgttttctatttccctatctctgaatcctcatggtcagtagaaaaatttgtattgtcaaggagtttcccagtgttgtagcttcatcctattttctcctgactagaataaggaacagccagacaggattttgttcatagtatctcctcctatactgaagattgttaagtcctctccatcttcactcagctggacaattcttgttcttgactgcttctaataaatcttattttcttatctttgaatcatgattactgctcatctattccaaagagtagagcgcagggcttcttgcagacttcagcaagcagaggtactgagatcctctgcaggagttcctcagctggggccagttatgcacactttgaggacctggctctccacacagcacaggaacatatgagcattgctcaggaatcaatgagcactgtacaagaatgagataagtagtgttatggactgaacatttgtgttccccaaaaattcatatgctgaagccgagcccccagtgtggctgtatttggagaaggagcctctaaggaagtaattaaggtttagtgaggtcataaaaatggacccctgatccagtaggattagtgtgtccttataggaggagaccacacagcgttctctctttccaccatccctctttccctctgagcacccacagcggaaaggccttgtgaagacataccaaccataaagagagcccttattagaaactggccatgctgataccttgatatcggacttctagctccaagatggtgagaaacgatatgcctattgtttagactatccagtctgtggtctttggtgatggcagcctggacacacttacataagcagctctggggcagtccttgtgctgctcccctgttcctctatcatcatgaggtctgtgcattcttgagcatactatgatgcttagattcagattttttttttctttttatcactctgacctactctcctacagaatatttaagacaaaattttcagcaggacatttttgtgttactgatatggagaaacccatttcatagaagagtttgttgaaccaggcttcttctacatgctatagttagttttccactggaattgatttaatctctagtacaatgaaatatatttgataataagccatatcatgaaggccttctactttgttattaaaatatcaggaatcactgtctgatgagttcttacgcattatgttttaattatatggagaagaagagttcttaggcttcaactcagggtgtgatttttttaaaattatttaaattgactttgaagcaccttccagccatttgttcaacagttaaattccccagaatgcctgctgttttctgtctaatttttgacattattatctttctggaaacagagctgctatttaactcagctagcactgaacagaaactgattattctctttcaatgtaactggagtgacttaaatacttacaatctttttgttaagggaagattaaagcataggagaaaagtgttctgtcttgcaactcaaaataaatatttcaataagaagtagccataatttccttatgaaaactatattgggtcattgggtgttcagtaacaaagtattagaaatagatgtaagcagttcctacaaggtcttcttttttgttttgttttgttttgttttgtttttgtttttttgagacagggtctcactctgtcgcccagactcgaatgcagtggtgccatcttggctcactgcaacctctgccacccaggctcaagcagtcctcccacctcagcctcccgagtaactgggactacaggtgggtgcaaccacgcctggctatttttgtatttttagtagagatggagttttaccatgttggccaggctggtctcaaactcctgacctcaagtgatgcacccactctgcctcccaaaatgctgggattacagatgtgagccactgcaccctgcaggtcttctattcttaaaagattcagagatttcctttgactttggccgtgatatgtgattgggcaggaaaaaagaaaagctaaggctaagttatactagggactcttctttctataaatcagagacttgtcattaccttatccttaatccatattccagtcagagttcttcagaaattacattcctttcagttacatcttcttaaaggacttactgggtcagggacacatgtggtagaatttagacaaattagatcatcttaattgttgggcagtgagttttagtagctcttaaaaaaacatttttaggcagtgagaaacaaagatccaacaataaagaagaaatcaatctgtgataaaaaagtaaagtcagcaagattcatgacagctattgggctttctattgagtagcacagtttggaatttactgaagactctgctttcactgggcttcaggcttcagaactctctcttttgtttaggcgagtagtgtagactatattgctcaggaagcctgtttctgtcaaaggaaccatgacaatccagctgtgttcttttcatcattagcctcagctgtgtcatttttcaaataacttaatgacacatccaaagcaaaattaagttatcttggctacaaatgtcaatatcacccatgacatcagtgctggtcttacatagcctctctacttggacctctggccatcactgcagatgcagctgtgagtggttccttcatcctcctccaacttgcccgtttctgtcagcattcaaaggatcggtcattcaacaacagcagacctttaatgaacaaatgttcagtgccaggcattaggctgggagagtcagtcaggatcaaaatgacaagggaaatacaaagatacacaaaagggaaaagacatttcctctctcacaaagctgatagcctgttgagaattagtgtaagtgagagaaggaatgactggaaacccactgccccattgagtattggttagagaagaagcatgagacttcttgcatactctttcttctcagagccccagatgtgatttacaggtgtctagccctattgtcctgttatcttagaagagaggatggctcaaaagagagaatggctaagagggggtcaggaaggatgaattttcatttttgcaccatttgtttcagtaacaaaataaagacaatgtaaactgcctccagcttgttgaaaagattaaattctctcacttttgcaatgaatcattccaaagaatggcaataactgcagaatctctctgtcattaatggcactgaagtcacaaatgcctttctcagagaagggcttggcaaatagcaatgcacctttcatttccactaagtagtcagctaacctacaggctgacaggaacatacgttaagaactatagtaacttcatgactgtgtgcctctgtgtggttatgaagatctcccaaggaaataagagcaaggtaactatgaataatggggtttgtctttccttgctgagcttttgaatatgtatcctatatactatgtaaatgattctgactctatcatattctaaataatgacatcccttattatacatgaggctttggttttcaaaataaatgaaccagcctgtcaggcatatggagttcctggaaataaattagaatctcagcaaaagccgcatgctgtttggatattgcgttttttaccttaatatactgcatatccctccttcaggtgacagatactcttgaggtttgggaggtccatgtacttcatgttatgtttggtgcatactctgggatggatcacagtcatgtggaagtctgaatgtcactatatgcattttattgactttaccttcaataaatagaactctgtcagatgcctttcagaaaggttgagaggtactcattggactgggtgatagggtgaccatttgcatattaaatttaagctacattaagtaatgtggagagcagacaggcatgtatatgcaagtatgtatctaaccctgaactcatacgtcttttcataatctattgaacgtgatcttgaaccaaatgcagtaaagcagtcagaggccttttaggacctttgtgtcttgggcattctttactcttgtttccacatgagtttgccttagctaagatctccagtgtattccactgtgattgtcgatttttatagcatctctcttattctttatttacctgtaagtgaattaaaataagctgtattgtgaatttggacttttggagcccagatttcataaatggggaaagcattgcttggagttgtatttaaatctaaatgaatacgagttctgaaatgtggttcccctactttttgctacacatctggacccactgaattttacaattgaattggacacttgaagcacgtctcataggaaatgtcagcaccaataattttcagaagtcatgaagacattccgatgtaaattttgctatcctgggttgtgcacgtgaaggagtatgtgaaacttggccaattgtgctgagcatacttgatttccaatacctgttaatcccttcttgtgaactgtcagtgtttttaaaggaacccaatgacgattggtctggtagtgatattagtcatgtttcagactataagagtgcttattcactgattgattattaacttcttggagcccctactaatctcatataagccatgtctgactaagaaaattcagattccatgcctacaagcataatcagcccattttattctcccatttacccacatttctctaggttaatgcattaattagttgttataatattatgagtatattaatgctaacagctagaggcacagacacaaatgaattaagccaggctgacttccagaccaaatcttctcttggtcaggaatcaaccatctagccctttccatctgaatcagtacctgcatgatggatgggagattaatgagtgtaacaccttctaggatctccagggcttcatcattagtatctgccactctagagcaaacgtccccagaaactacctttaatgctgtctgccatcttttttatgttggggagcaactaatttttctaagtctaataaattatactatgagaaccatgcatactcaagagctgggtgcctctctccatagttcagggagcatcacagagtcctgtagttctttacaaacagcactgcaatgtggttgtgaaaaaaatcaagatcacttctctctttctctctctctcaatctctctttctctcctcccccatgccccatctctctctgaggtccctaacttacctggcctgcccactttgctgggaaccatttaatgtctgagcatggtgcttgaaaagatacctgagcatagaaatgattctgcaacagaaatgcctgagttgtgtgagtctactcagccagtgaggaggatgtatttgaggggcctgctggttctattcattgtattgtgattttcatcctttactagtcagtggcagtgtttatttataggtagactctgtttttgagaatcaccacttagcattatgggctatctgggttgtagtcacacctagccactttacaagtgtgttttctgcagtggaaatataatttatataatcaccttacaggaaagggccggagctacattggttcatgagtttgatgtcggcgacgtccatggacaatgccaggccagtttccctaatggcttatacatgccacctccatatcgttcctcctcagaacatcgatttcccctactgtccttggccagaccctacttatcattttaatacctttcagttcctggcagtcttcattttagtattctgattttttttgccctttttttctttaaatatattggaacagggagtttagagaggctacatcagggtcctctaactgattctgaagacacaagagaatctcaggacagattttaggttctccctgccctcaagcctgctgtatactgcttggagtcaggagcttttgggccaagcagctgtgggacaggagcctctcactcctgccaactgtgagaaccaccagccagggtgaggtgcttcatcctgctgaacatgatgtttgcttttaaatctaaaaacagatatgatagtacattcctcagaggaactctatggatttgttaaatgaaataatgcacataaacagcttagcctggtgcctgagtcctaagtgctcagtaattattaattactgccattatgactattattttattgttattaatagaacaggttagaaacatgagaaagttttagtgtaaatgcatacacataaaagtaaggacacagagtcataaaatagtttatatgaatcattgctgtaagtttcatgccagatagtcctttaaatattgagcacactgcactttcaccttttaatacttattttatgaatgcagttagtatgaactctttcaggtaggccaactgtatagagtatttaatgaatcattttgagtaaaaggtagccctgtattgttttctttctcaattcccattttatgggccccaatgttgtgtcactgtttctttccccaacataaggcacagttggtgaatgtgaatgtggcttcctgtccatcattcaacccaggatgatgaaggaatttagatactacgtgatagaaaaacagtgttctggtctgggcatggtggctcacacctgcaatcccagcactttggaaggtggattgtttgagttcaggagtttgagaccagccagggcaacatggtgaaaccctgtctcaacaaaacatacagaattagccaggcatgatagcatgcacctgtagtcccagctactcgggaggctgaggtgggaggatcccttaagcccagggatcaaggctgcagtgagccaagattgtaccactgcactccagcatggatgacagagagagaccctgtcccctaccacacacaaaaaatgttcaccatatactatgcattctctctcaatatatctctctctccccagatacataatatgtatttatatatttatttaacatatatgctaaatatctgcataattataaatgtactctaatagctttttagtttcctagggccaatatgacaagttaccagaaacttcatggcttaaaacatcaggcatttattctctcacagtcctggatgccagaagtctgaaatcaaggtttccgcaaggccatgccctctctgaaggctctagggaagcattcttccctgcttcctccagcttccagtggctccaggtattccttggcttgaggctgcgtcactccaatctcggcctctgtcttcacattgctttccactccatgttccatatccccctctgcctttctcttataaggatatctgtcattggatttagggtctacccaggtaatctaggatgatctcatcttgaagtctttaacctaattatatctacaaagatcctttttccaaatagcatcacattcacgtattccaagggctagaatagatatgtcttttgggggtaccccctgcaaacatgctataatcattttgtcactttatcatttatgttaagtttagaaacaaagtttattgctataactgtaaaactcaagcaaacaaaaacaatggttcttaatagctgaaaaagtatataccaataccaaatgctactggaatgttgagatctctgcaacatgaggttgaagggaggcacaatgcacacttgtagaagccgtttgaggaagtctgaattttcatgaaagccattgatccaacctggaccacatgtccattcttccaaatgggaacagctgtggcaggtcatgaaatgcatgtatctgaaaaggggggctgtggatcttcctttgtgttctgcctttcagaacctgaggaactgatccaagccagccatggatgctggtagaggaaaagtttctgccagatctgcctgggctttaagcctcatcctcttttcccatcttcaccctgtgctgtgattgcctttgggttctccagtgccatgactcagagatgccctcatgtgggaacatggccagttcactgctttagttgtcatcctcagaacccagtaagctggcaggatgaatcaacatcagacatagaactgatacaatttgatattttaacctccagtgcaaaactggactgtcatctcaattattttctgggccccacacaaccatttgactggcaggaagcccattctgctaagtggatatggaaggtattttggatttcatcctgaccagagaattcacagactatatttaaatcagcaagaaatgcttatgaaaatgcagacatggttgctattgtttttgcctttaatttccatcattaaacaaggcagatagtgatgcattactgcccatttgaggattggctgagcatttctagagagcattgagacagggcttcttaccctttacttactgggagacagcagactatgtcatgactgacacttccctccagctgccttgctgacatttagccagcaaaaaggctttctctagatgcctagagtcctggggcattcccatgatgggaactcttaagcatatccttctctcctttgcagagtaaaacaaaacccacagaaaatctgacagaaaatggaacagagctaacccttactctgccatgcactgtacctgggctttgtccatgccatctcattcaattatcctagtgaccctgtgaggtaatatgaatgaataaatgaagcagaatacattatttcagcctcaggatgcttatcttttgctttaaattgctacacaacacagacatgatttcttataacgaagccaaatcccaaagagattaaattacttcatggagctcatgtggaccaagctgagccttgaacctgaacctactaactgaaaatctttgttctttctattacatcaggttgcaaattaatgcagatactgtggtcttgccctaattcaaatttcccctgggctttggacctgcaccgtcagaagcaaaggggcatttaagatgccaagcagcctaagtcacctaaacaagctgcccagacagccctgcagtgagctgccctgacacccaacttctgctcagaggcttcaggaaaaaccctcatcagccagtgcagtgtccagaaagtttgtaggtttttcatgtagtgagaaaacctgcatgtgagtcctgcttaggattcttactgctgcatagctttgggcaagtcccttaatgtctcccatccatcttgtccatctgtgaaattgggataagatcacttgttatgcttccaacaaggaggatgatgagggtaaagatacactgtaaactataaaaatgactgtacaaatattaaggtgctgttacaaggagatatatacactcagagatagatgaagacagtccctggcattatgaattccccaattgtgatcactgcccataaacaccccaggctctcacagaagcctaagatgcaaaaactttaccactgcttgtgtgcaaacacaccaagccacctaagcacttttgttctcatacggtattgggtaggggacttttatgattggaacctgacaatatttccaaggccaatgttttgttgacatctgaacttgcacaaattgcctcatgtgatttatcacactaagtagatgcctagtaaatatttgttgaatggataaaagaatggctacatgccttctagattcttttcagtgcattgcaaaggttactgtcatcatatcagggagaataaagtgctgaccttgcagccatccttgtcaatgcctgggtgcctctgctgctgcctgcgagggcagcccagggcagtctccagggccgggggccaaggtggcagccccagagccatccttttgtcaggcaggccaggggtgggggtgcctctgaagcctgcattgacatatagcatctctttttagtaaaagtgcctccctagtgccaagtaccctgctcagttgcaggtcatgggttttctctctatcaattatgttcatgagttgcaggtctgagggttccctctatcaattatttttggattttgacccctggatcagtaatcataatgctaaattttgagatgtcaagccaacatcctgaatattcctgacttcctcactgggtgatgctgaggaagaagtagtttctgatacctgtcactgtgttttgttctatcgaggaagacacacataccaccccgcccccccgataactctgatccttggccttgtgcctaaaataaaatgttcacttcctaacaccccttttcacatacttctcactggagatagacttttatgaattttctattatgagttcacggacacatgtgattacgtcccctttgctttgcaatacagagatgttaccacgtgacttgactgtcctgaggccaaaaaacccataaagatgacataccaggcttgttatgcgcactgctgccttttcatagctcattgctggcccaggtattgcactttgggggcagagtcagaagttaattgaagcggctgccacatcgcatctcacagagaatcctttctctaacatgcgtgactggttatgtctccatgtagtgattcttctcttttgctgtgcaaagcataactggaaatataaagtcttggggaagagggactttcttcttgattggagtgaaaatatgacagaggcgggacttgttgaggaagtgcttgcttccatggctgtcagcactttcctctaacagagtgagccattttttccaaaaagtgtttttttgataatcttcctgcattttatatacttcagtccatgttaagaagttttctgagtagatggcaaagaacaattcttaaaatgtgcgaataccaaatgtaagataaaaaacataattgcagtttagacttcagatttatttgaaaaggggataatgatagtaattacccagtttgagttttgtagaaggctaattagatccccaaagcatttgtatgcacaaggaaaaccataaatacaaaagaccatctggtccttatcagcttacaacactaatactgtctgtaattattttttctatactgttttgatgttgacattttatggagcaatacattctacgctggttagggaataacctacatttctgaaaagctgggggtttgcccccttttttcctaataaaagttttaggactccaaaggcaaagaagacactgcttttcagaaaaaaaaaaaaaacaggtaaacatcttttcattatacccatttgtactagaaatgtgttgtttataaacctctctggcttatctgacttgtcttgttagtaacttagtctactaaatgcttggattcagttaagtttctttgtttgcttttttttaggtaaagttgggaatgacacatttagctgtgttgtgtgtgcatagaaatgcagccttcattagtcactactttctatagttagcgctgtccctggcaatttggatattacaaaagtatttaataacattatttgttttcatgttcattctttgtctcccctactagtgtgacagagatatttgtctcattcatttcattttatctccagctcctacaacattgccttgtacatggtgggtattccacagctctgtgttgaagtgaatgggtaaatgaagtaaaatacatgatttagatttacatcatgtattctacttcatttatccaatcgcttcaacaaatagcctctggatgcttatgactgatttgctatcaattgttacataacaaataatcccaagatttaatgtcttacaacaatcaacatttcattcgatttcaagattctataggaattcaggcaggaattggatgagaattctttagttccggatggcattgatggaggtcacttggtggtggtcagctggttgatggactgtctagagagcccaggacagcttcagcataggcctagttcataaaatagatggatggaaggctaggctcagttgcgactgttaacaaaagtacctgcatgtggctttttctcatggcttagaatttctacaacatggcacatcagggttctaagaagtccagagagaatgtgctagttgtctgagaagataagcctgaattgccatgacattacttctaccatattctattggtcaagcaagtcaccaaggccagcccagattcaatgggaggataattagactcttcttctccatgagagaagtacaaaagaaattgcagccatctttaatgtttcataccagctagttgaagggaaaggcatacttactgagcaactctaaaacaatgtttaaacaaaaacactaagttccgtatgcagaactctcacattaatgcagagtaagaaaatcaacatgaggaaggaagtcttcatggaggtcaggtttgagttttgggctgagcctggaagaatagataaggttcaaatcatgaaggtactggagaagagtattcccaaaaaaggaacattttgcttaaacacagatgtgcacccagagttgtcaacactgataacatttatctagcagctgttagtttgcagtacattagtgataaaaggacatggccatcaccatttttggaaggacttgtaggaaacagcatacacaatttctaaatgtattttctgtgaaatgctaattgcatccctcattacagaatcccttgtgagaatcatactaggcatagcttttttagacctgttctgcttgcttctttctgataagaactaggacaattcctattttcttttacccattggcttttaggatgctcagacccaagattgaaactgaatcaataatgttgagccttccatttggcattttttgcaatatccccttttctttgatcttaatactttaattatctttcgttttgctcttttgtagcatgaatggtttgctttaatctctctcaaaaactttccacaaactcagttgagcaacttagaaaaagatatataaagatgaataaataaaagtttgatctttattttaaaagaacatatagtttaggtaggattcatatacaggaggatgttatggacaacagaacatttgaggaatggactccaaatgacataattgctcaaaataagatgaacaaggtgaattgtggacactggattgagtctttgaaagctaggatgaagagtctagtcataactggaaaaactctacatcaatattacatagtattttaaactgatacagcatgcacttttctgcagaagttaaatatttcaaggatattctgaactcttcttcatctaggaaacagatgataattcttataacatttttcagcccaatagcattgagggctcaacatgaacagcagcttctaccaggggctctgggagatgtcaagtccagtaagatacatttcctacttccaatgagcttatagttttgcaaccaataaactatcaattaaatggaatttcctcaatcatgtttctggatcttaatacctctggccctctaaacaaggaacgcaggaaacagtagacatttgcttcatgtttggttggagaaatagattgctccaggataagcagggttttaaaataaatgttaaaagtacagaacaggaaattatcaagcagaatatgtgcctgtcttcatgctgtatgttcatccagtgaaaaaatatgcctagttttatttcactagtagacctggatttcagtaggttgatttcatctgttagggatagaagagccggaaagaggatttcagtaggaattcacctgaccatgaggaaagtggtcaaggaatgaagacattggaggcataaggtcttcttctcttccttctggagatttggtctctcatgctctattcctatgacagtagtggtaggtagggtagggaagatggcagagttctttctgggatgaagagagcagatgaattgcattgccatgttttagtttggaggaatgaggctttctgcaaagaatgtatatgaagatgattacttgaagaaaaactatagtcattgaccccactgaaaatcagaggaagtgctttaatagttttgcatataagtggcacctttgaccactcttacctttgggggtgtgctgtgcaggcccctccaggactaagtcaccaattcctcctgcttctggaagttttggcagttgatgactctcagctgattctaggaatagcgttcaggtgaagagagcccctttgccctctccagggataggtccaaatgcctggcctgcctccctcagagcagaacaacactgcagtaccttcccagctccagagctcctcctggatccactaatgccttctgtcattcgttttctgcctctgcccaatcctactccctttacagccccacagctgttgacactttaagctacatgctcatctccacctcagtttgcttcctggaggatctgagcccaagacatggaccatctataaaattgtgtcccagaaccaggattcaacaaaccattgtgacggccatgctcattgccttggactggtgccaggcatgaagatccacatttaaataaggcctgtgaagacactgcagtcggaagctgtccagaaacgagtatggatcacaccggaatactgcaaagtatctctggattacttcctccagaactgaacactgactcccctctccttctgctctcccttctgttttcatctcttgtttctacagccctgttctgagtcccacctgctccatttatctttataatttagcttcaaaatgcacctgcccagtgaggcataaatggtgatatttgtctctcatattcagtgtgtggaaaagtgtcggggcacgtgaagaaacagatctcaccctggattgtgatgaagactggcatttctcctaattataaagaatataggattcctggatctattgatttccattaaacttgtgtagagttatgaatcttaaaatggaagtttacaactatagataccttaggatagcgttttatagcaagcaggactctagagagcaccatacaaatcagcatttgatgcttgtcttagggttttatgatttaaagaattgcttgtactttatctgcaactatatcccagctatcccttgtaattctggcctgagtgagggaaaaagctattgccaaggtgaaggcagagctctagacctctcctgaaattggttattttcttccttcactcccttttccttttagctgctgttgaggacttgttccttatcatgttgccagtgggtccctgctctggatgtccatcactcatgatttggaaagattctccccaaagttgcatagcaggagttttgattgtgcctcagcgctttgttagccagaccctcatcactgtgggctacacacatcgccatggaatgcagggatgtcagaaaaatgaaactgggccttccatcctaatttaaagccagatgggtctgccttaggtacgttcttatgtcagcgatctagatattagatggtgagagatcaaagtgaaatcataagtgaatcctcctttcttcattatcttttcttattctttaagcgagcatttgttaaacacccactttgtatgttcatatatatatatatatatatatatatatatatatatatatatgcaccttctttctctttctctccattttctttctccttttcactttatttctgtaggaaataattgaagtcatacccaaagagagtgctgggtgctaacctttgtatacggtgaagaaaagtttcacctgtccacctaagagttataaaacattagagaactgatgaataggtctataggagctgattgaaatgccattttttttttgccattatgattggatgtataccttgcatcctaccagaatgctggtgtctgttcttccttccaggaaccagagaggggacactggctgctcttgagggttatttgttctagcctctggtggagattgatgaactattcttccttctgctttacaagatcttaacttcctgatgacatgagtcttccagatattgtatttgtcccctgtatgctggggattcttgacaaatcttaatattcacagcctcgctacatacctatccttctgtttgcactcattaatacgcactgtccttcttatttcaacattcagctattgctgagttcatgtgctattatttttcaagtacacagggagtagtggttccttagcacagagtctttggaatcagacagccctaggcagtggacatgctgataagaattggctctttaacaacaaaaaagccctgattggtaatgcttgctgatttttgtggtgtaaatactcccattgcagccaatttcaagctaccaaagtgaagtcattgaacatggaattgaggaagatgaaagcacagttggttgtcatgagctggtgccagacaccgtcatccctaagactgagcccaagatcaccccttgctagttctggagatcattacttagctcctctcagtctcaccttcctcatttatgaaagggggttaatatgaaaatacttaccttaaagggatattgtgaggattaaatgatatttcatgaatagcacttagtttagcaggaggaacatattaataacaatcattcagtaatggatagctagttagctaggtatgctaggtaccttaacctcatcagtaatgcagcttgctctctggagtaagcattccttcggatgaagttttcagtataaaccaactcagttcatgatgttggtttcagttgtggaaaggggttggcctcctttggtttgtggatatacttaacaaagtaaggctggtagccctgctcatctcctatagttccagcatcttctttactttacagccaattgtcaaatggctactgttcacaaaagagtctgctgtgctagatgttgggaggagaaatgcctgagtgtacctagaccttgctcaggcagtttgtggtttagtggaagaagacaggaatgtgtgcaggtaacgtggaattgtgaagatggctgggctgaagggagtcagggaaacaagcacctttgatgctgcaggctacttcccatgagggcccgtttgggcttggtcaatgcactcagcttcaggaataggcacagtatggaacatgctttcctggtgtgtgaatcattcccaagtgtggagtagaaaaggcttgttgctcctctaatcccttctggaactatgtgttccttcagattagagtctccatggggacatctgtgtcttctaataggagttgagacacttttttttgtcttaaaataaatccacctgtccctactgcattctttctcagtcagtctgagtcaagggtgcacaataaattctttgaaattgtattcatgatgagagcagacacctctgccaaaatggtcagtcccctgcacacttccagatttccagtttttcctccagtctattttcttcccccagattgtgtagggaatgcgaatccaccaggtcaccatttgtctctgttagaccatgccaaagctatagttgtcaaaattttattccccagctcttgaacttctaagtgtttgacgttgtgtctaacaacatcaaacatctaagcatctaggggatgcttttccttaaagaaatgaaaatcaatttgatcacttgcataaactattcatttccattgtccatcttttcctctgggtgtaaacactttgaaggtaaaggattcacttttatatacctagccccacagagagctgacagtgtggaacacatagattcacttgcaatcatctcagcaaccccaggaaggaggtattgttttatgtcttttatatacatattgaaacacagggtttagtaacaacccccctctgcagtcgtgggatgtaaccagggctgactccaaagcctctgctcccaggccttggcagccaacaccccacttttatccgctgggcacaaggcgctacccctggccacacaaatccatctggaaaagacctccattctcattgaaaccacaggccatacacatacattggtctggctagttaagaaggttagatattcaaataacataattttaaaatatttaatttcactgttcttttaaggccataaaactgacttgcttttaagaatttacaaagacactttgaagagataaatttacggaaaaatctggcccacattttccaataaaactggtcctgtgttcctcagagctacaaacaaggctttgatgaaaacacagaaatcagtagcttgcctaggatgaagaacatgaggcttctcctactcattctcagttccccagagaccatcttcttcccatggatatttccctttgctttaactgctcctcagaaaccggcgaatgggaggaaaggagtctaaagacaccggggctgggaaacgatagctgttctttggtatgtgtatgtgtgtatccctgtaataatttcccctttaaatatagaagctgggaagatgcttcctgaaggtgctaccacctcttccagccctggcttcttcctcatttccctttgcttctgtcctgcatttgggctcacactctgtttaaaatccccttctcagacaggcacagtggctcacgcctgtaatcccagcagtttgggaagccgaggcgggtagatcacctgaggtcaggagttcgagaccagactggccaacatggtgaaaccccgtctctactatacacaaattagctgggcatggtggcacatgcctgtaacctcagctacttgatagcctgaggcaggagactctcttgaacccaggaggcagaggttgcagtgagctgagattgtgccattgcactccagcttaggcaacagagcaaaactctgtctaaaaaataaataaataaaattaaatccccttctctgcttgacaaaagtgtatgtgtgtgtgctcgcatgcgtgtgcacacgtgtgcatgtccttcggtatccaattaaaatgttcctcctccataagacctatttgaatgcccgagccagaattcgtggaacctacttctgtgtcctggtggcactttctgtcatgccagtggcccacatctgctgccttgtggtattagcaattatggctgtgcctggtttcagaatattgctcgaagctgatagataagctccttgagatggggcctgaatcatccatgcaggttaccttcctaccaagatgctctgtatactgcagtgttcagtaaaggctaccaaatcatatctgctttccaaaaatttactaaaatataaatattctggggacacccagaactccctttactaaagcaattggttgctctagcagtattaagagacaatggggtttgtttcacaatagagcttaaatcattacattaattgtttccatatgttgcagttggaaagtccagttccttgttattcttcctactgtgatcctaataaattacattgtctcttcttggctgctggagcctaattagcattaattcttcagtgaattttaaatatattcactatcctttcctatttttcactagaatagattatttgtgctgtcactaaagcagggtctctcgtggttctagaaaagccatttctacacacattacctgccacttctcacagctctccataaatcccatagcaataccaaaatatttctaagcttttccatctttagttttaaattttgctttcaaatttttaaattaccccattataaggtattgtttatttctttttctgtagcatattttcaaattagcttaactatctttctttgcaaatagtggcaaaaatccactcagtcaaaggactttagctatattgtaccccgctgcagcattcaggagataaactgatgagaaactagttcattacacatttccctcagaatcccaacccacctttcaatctggtttcccattaattcttttcagttctgtaagttccagccagaatgggtacagtttggaaatcagagagactagcatctggagcatctatacatggatgattcaccaaaatggacctcttgcctatatgtccaattttcttctgaacacacacattcagatggctaacagatttgtccagcttaagaggaatataacagaattcttgatttctctctaccgggtcctcttacctgtattaccaaaacctgctgcttcttgctgcttttccatctccataaatggtgctaccgtctgcctagctatgcaggccaaaaaccaaagcacaacaatgaaagataaaacaaaatagaaataaaaaatgtaactcacccattatttatctctctctttttcttactcttcacttccaaggtgtcagtaagtcctattggcctgtccctaacccaaccaccactactatatttactgctgaaaccctggcacaactatcatcttctcacccagattactgcaaagcacaacaggtccgtctgcttttattcctgtttcctttgctccagttccacatagcagctaaagtaatctttttgaaagaacaagtcagatcatatcagttccttatttatcacccaacaacaacttcctcctgaaaaaaataagattcaagttccataatatcctacatgacctcaccaagtcatctccttttcctctcttcttgtagcagcttccatggcctgctttcattccctcctgtaagttcctacctcaaggcatttgtagccccatgggcctataatgacctcttccaggtttctgaaaggttattgctttctgataattcaggtctcagttcatataacacctcctcagtcaggccttccatatccctcttactaaagtagtcactctcccactcaacactattcacccaacatgtattagttatcatgtggcattctccttctggcctgtatcactatctaggataggtaaatgaatgaatgaatgaatgaatgaatgagatgggttacttgtctcttctcaggagaacacaatatcttggaggacagcaacagggtcagttttgatacactctgtatttccagcacctagaacaatttttggcattgtgaggacaataaatattgaatgaattaatgactgattgaatgaattcaggaatactggacctatcactttgggaccatggacaaatcacttaattcctctacatttgtttcttcatctataaattggttttgttggcaggacagaaggtaatcattacataaaactctcagtaaaataagcaataatcattgttcattgtgactgttgttgtttctctgtatatttcttttctcatcatcccatctacttactcctgactctttgtgcttggttccccttgaggtacgccacaaaccttccctggccctcccagctagaagtgccctcttctgactccaacttcccagtgtgtttgccttgaatatggctcttacccaaccctctctgcctgtattcagctattcaacgttcctttattgccgtcaatggaccaaacatttatgctgggtgcaagcatttattttttggtctatttctgaagcttgcttagaagcttcttgagagcagatctatgtctgattagctttgtaaccttgcattgtccagaattacgtcttcatttagtcctcatttcataaatatgcaatgaattactgtaactgaaacttaagctactggatgcattaaatccatcccattttgtccattgccacatttcacagggaaacaagagggatggggctgtgagatacttgaaatatttgcccatctcgctgccagaggcccacagagttttggggttatgagcccctagaactaggttgcctggctccaaatttgattcaaactatcggctctgctctttttgacatacgttcctactaggaactttgattaccaagtcatcttggatatagaaacaaaattatacagtgttcagtggtataaagatgggggttggttgttgactttccctttgtcacagctagaatacagccagtcagcacttgattaatttcctttgttccattaaaatctaccatagtgctgatctagtgacctaggggctcacaagtgaatccttgccctgggcaaggtccatcagcctccaatgtatagatgcttttactactttactttccacttcattctcaaaaacaaatatgtaggaagtttttataattcaagccacctgctcattgcatgtagacatcttcttgatgtaatggcacaaccaaaccaccagacaccaacataaactttccactacaatggcttagaccaccattagttctgcttttttttgccatcccagtaatgggttgttaagtttaaatttactttctaattcacagcaactgtagttttgttaattactttaaatggtttctgtgtaaaaaatacttagcattaatggcattctttggatttttaagagtgagttactttcattaattagccagttaatatagcatatctgggtagaggactttatcagcttggatttcattttattgatggaagaactaaagcagattgatgcagactcgacccttggaactcttcataaaatgtcttttaccatttatttctttaccactttctcctctgcttattttaccacatcttcccaccccctaaacacctggcttacagactggagtatgtgtgttaggggagggggtgcaggggtaaggtggggtggggagaaacagctgtggcacaaaagaaaatgtaccagtaccagggagtaagctagagaagaccctgttctacaggaagagtgttggttgaagcaggggtttatatttccacaggaaagtcacattggtaagcatttttcagatctctttgtataaagcatgcccgttttccagtggtattaccaaagaccccaaccccaaccccagaatgggattgggctgatcccctattactccaagtggttggtcatccccaaaatatatctccagtagtacatccagccatctgcccagtaaactaaagtgagtaaattttgctgaacaaagataatcatgaaagggtaaatgtagtcatttcatgcttcctgggcaataattttgctggcagaagttcagtcaacagcatttgattattctctgcattgtgggcatgtagacaggaagtagtgggcacagccccggactctgaggtagccaagtttatgtgagggctgtgaaattaacatgtaaagtacagatgagtgccttcgatgggcactgtgaaaggagacatctttacttttacaaatgatgggatgttggagtgtgctgtggaattcacaaatctttgaagccctcccagatgagttacacagcattttgtcatttgaacaactaggaatatttatcaaattttcagaggacataaagataaaagggacagtgaatactttcaaatatttcatccagattcaggaagacctcagatgctaagaacgggttgatgaaatctaaattagtagaaactggattgaaattcagttcatggctctaaagcctgggacatgttagacccaactaatccattacaaaggataggatactcctagcacatttttagtggtctgacaatatctgaaatttcacgtccaattctgcattatatagaccagcgctgttcaatggaaaagcaataggagccatatatgtaattttaaattttctacttgccacattaaaaaagtgaaaaaaaggctaaaataatttaacaacatattttatttagctcagtatacaggaaacattataattttgatatttaatgaatattaagcatgaataagatattttacatttttatactaagtcgtcaaaatccaatgtgcattttacgctaacagcacatttcaatatgaatgttatgttttcctcagaaatacttcatctgtatttagatttcatgaaatttacagttggaaaaataagctcacttaaacaagttgttccaaatatatttgagaagtgtccaaaagtggaattaaatataagtttttaaatttaagtttgaactatttaaaattaagtgaaatttacaagtcgtcttctcagttacactggccgcatttcatgtgttcatgtgaagatgttagctaccatattgcacagcacaggttcagactcagcatcattcacagcatggtgagtggggtgaggcagggtctcaatcagaaacagtaggcaagacagggcttgcttggtatctatcagagacacaggggaggaggctggactgaatgacctctaccttgctctgagttcatccagtttttcagaatccagccccagcgatcttgcccttttgccttgctgcctccctagaggctgctgactccgtactgacttaagtaaacaaggcctgagcagttttagtctttcagatatttgctatgccacgtgttttctcaagttcttctctaaaagtagagatgcttgtagctccttgagggcccatcacattttctgaatggataaactctcctttagaaagacagctggttcagcatgccccatcagctcagcataagccctgttcaatgagctgtcagtgccttatggataaagggtgtaaaaaatggttgtcctcaatgactcgcctattgtcatcatcgtcattatcatcatcatcatcatcatcatcatcatcaatatcaacatcaacattgccatcattttcctggccccttttcagttcatcaaatcctcactatctaactgcaggctcctgtttggggataggggacactaaattcttgtactacatgtcaagctgtgtaggttatggaaaagagaaaagaaaagaaaatgtggtaggcatttttatgtaaccttgccagagggaaggtgggctagctcttcctacctctttctaacagttgaaaatactaaaattcacagaggctaaccagcttgccgcagctcacatgagtggggcttagatgtaaatccaagtagggattgattcccaagttcttgttatttctgttattcattcctactgaagaatagaactcagggaataaaataatacaggtccccattgtaatatgattttgttgtacattgagtttctacaaccaaatgaaggtgcagtcgttagcctagaaagctgatgggaaaattacttttttactgctttgttatcagttcatggacctaaacttcaaataaggattctacttccactttttccttctatgcatgctcacaaatattatcttacaccttttctcacacttcttcataattatccctattttgcagatgaaaaattcaggaagtctctgagaggaaaagtaggtgtttcaggtaaaaacattggtttcttgtgaaataatatctcaggagggatgctacctaggttcagaccctctagagcataaaagaaaaagggtgagaagctgatggtagaagatggccttgtttctgtatcgtgagttatgagtgctgattgtcagtgatgaagacacattgcaggaagtagccaagtgggagaggtggaggtgggttgccaagagcatctcaggaaactcagactggaactcctgcaattgtggacaccaaccctgtgaatgtgttgtttttacacagtaactctctgagggaagttgaaaaggtactaggaaaaaatggctgaagcatcagccaagatttagagccctttcttgtggttttcgcttagccaaatgttgagaatatggctgtacattccaggcagcatagaggagaaactcgagagtaaaaccacggcagacttagtgcagcaatgatacacaccacttagtattcttttttttttcttaagctagtgaactagcaagagttctacataataacaatccaaataactcattgaatttctagcaacatttgtttattatttattattattattggcaaactgaacatctaacctgagagtaaaatgctgatacgaaacacatgaccatttgtgctgctgggacaaggtgggggtggggagtttataaaggtgcctttaaatgcatgaaatagatgcttttcctacattgacactagcgtcccaacagaaggatgacaccaagagagtctcagtgtcttttataatgtcctagaaagtgatgaaggctggggtaggggtgccagggatcagcaggggctgggcaatgagataaaaaggtcttttaaggcttagagcagaggtgtgtctgctgagatgtccaagagcaataaccaaacagtcatcctaggtccagattgcatcctgctcttgccagtggaatcttgtcttaagcatgatggagtggtgttccatggtcaagacttttgagaatggttgaaattagtataagagctagtatgatgtcaaaaagaaaacaggaaacaagaactctgggtctctcatgctgtgatttcaatcgtggtcttaaactgtggacatggccttttcttgttctggattttatggctttgagacaaaggtaaaccacagagtcagccattactgacttcatgggctgaagggctttcatcatatagctgtcacttagaatcttctctacaatcataagcacataaaatatgtcttattctagattatgtcttaaacagcaacagctgtcttcaaggtggtgatttatcagcatttaggtccaatggcaataagagttgtatcagcagacctagtgaaagttaatcattgaaaaaatattattctacctctacatctacacataagtattttaatctgggcagttcactaggtgagtatttgattatgaagtaacaatagtcacaggagtaagcaaaataaatgtatttggtagtgttggaaatggctcaaaaacccaacagtagccagtagagctgggaggcaaggcaggggtgagccagcagaagaagggtggctttccagggaaggcccatgtggtcagctgttcagacactgactgtccaagtgcacatcaaacacacaattacatctgaggcaaggatacacagaaatattcaggggataaccttgattaaagatggtcacatgaagccgacagaaaggtgtgtggtcttttgaaccctggcagtcatccatgatatatctagaactgccccacagctctgagaggagattccattaccatatgtggtgaacccttgaaataaattcaattccaagatccacatcctgcctctgaggacgccctagcatccataaagacagtttcacatgtggaatctgaggtgtaacggatgggcattaatgtgtgtggtgtggagtgcttttttttttgcattctgctataatgcactggtgtcttctttttttaagaatatgttgacacatgcccattcaaataaataaatggtcccgtttctaccgatctgtttggaagcatcaagaaattcatgtgggggaaaaaactcatttctctttagaaattgcaaagaggaatgtttcagaaagaactgaagaggagaggcatttaacaaattatcaataaatcagcatctaattttttcctaatataagccctggttatttatatagttcaggtggagattgtgagaaaggaattataagatggagaaatacaaagaatctttgtgttttgttggagagccagaagagcttcaagcagatgtaagatgcatgccttacacatctgtgaatgtgggtgattattatgtggaaaagtgactctcttggtagccaagcagaagaactctatttttttctacctctatattaatattattacgactgttattacaattatcagaatgagattaacataccagaccagaccagtatagatacagaaggagttgtgttttattaccagagtctaaggacatatccattcctattggcactcaaaatccaagttactagtactgtgtcagctaatgtgaaataagaacagggcatattatgccaggagccattatcaggagcaggcacaagtaagatgtcagccatggaagcatagaagaaactagaggtggcatttgggcctggggagcattttcctacttgtttctgcatttctaattcttgagtgatgagagaattaacaaagaagaggatgcctcttctttgaggtccacttctcattactctgcttcctttcatggagtaactgtgttaaaatggctcagaggttgagccatgttgttttcctggaagatattaaactgctgacaactgaggttacagcctggatttagccatagtcagagtcacagatgcctgtgttttcatgcaagtagcaaaaatcactaaaaacatctaatgagtacataaacatcaaaacctcacaattaaattgccaaagaaaacacattttccctcttcttgtgttctgttcatggaagtcttgacactttgggctatgcaggaagggtcatgatacgtagagaagccggatgaacaccagagaaaaaggaaggtctaatctttgcaattttgtcagctcactaagtcatttgtcatgtttcatcacatcatcttgaattctttattccccactgggaactgactgatcagccctgaagcttttagctggcaatgtgataagaagtctctgtgctcccatgagcacagcaaagaatgttgtatgctgtaagcccaaggagccattccactcagcactcctttagttaggatgtcctgtgggaatggcccggttcctcacagactccagttcattgctggagactggcttaggaagactgtgatggggtaggctggaagacataagaccatgcaccaggggtgggaagcacgtgttccggaagcccagaggaagcggaaattttttagaactaagagagtttgggggaacactttaaggccaagctagttgaaacctgagacagttcagatttcagcacctggagtgagtctgggtagaaagggaattccaagctttggaaataagagcaagtatgatgagttgtattgcaggaaggttgagtggtttttctgtcttgagcattcaggttgaaggagttaagggtgggagaagagattgagactaggtcacagtgtgcattgaagaccaagatgagtttgcacctgataccacaggcaatggagaagctaacggagattactaagcagaatcagacctgcagtttagggagagtatagttgctgatggactgaaaaatataaccatccctctcctgagcttgagacttaaatagcaactgcctcttgagcagcgactctgtctggattttatgtgtaaaatcttacatctggcatgtcccaaagttctaccaatgtaaacttactcctccttgtcaagaagtagcacatacacctgctcagttggtcaaactgaaaagcacattaaaaaaagttatcgcccttaaatgctgtctctatcttcccacatcacacttgtcgtcatatctgatagatccaaattccctcttcatgaatctgctcatttcctcttactcattgccaccactttggcttaaagaagacccacaccagccaattccattcattttttatcttcccagtccagctttcatgtgactgccagttattgtttgaaaatagagatgagcttatgtaacttttagcatcttttgagattctaaaaatcaccactggttctcttctaccaaaggctaaaaccctgctccttagaatatcataaaagaaccttcataatttgcctttctctaccttttctgtcttcaatcttgacacgacccaccctcccccaaacacacacacacaaaaccgtgagtggtcttgtgttttccaggtgtatatgctcattctcatcatcactcttttacacaaaatacatgttcagcatggcatgtccttttcttacttggcaaactcctactcaccctcagaaatccaactggattctttcctttgttgccccttcaaagtgattggcttactactctgtgctccagtaattgaaagtacataaagtgactagtttagcattactaatctattgtattgtaatgagctattttaccatttaggcttcttccactagggtatgagctgcttgaaggcagtgatggtctcattgatcttagttcttcttatgtcatctgatactcaggagatggtcctcaatatctgtggattaaatgaaggacagagatgactacaatctcacattttggtgtgagattgattattgatgtgctgtttcttaactaggctctcaaatctcctttaagtttgccttttgttattctataaaatgagttaccagagataaaacatctaacacaatatctgtggttggcaaatgtgtcactcctaccaacacacacatgcacactttttaaagagatcatttatgactctttaaagaaaaataattaccagtgtagcttatgaaagagatcatgaactaggtaataaatttgatacatgctttcatcccagaattttaaacattaaattaactcctgatcctttagaaaaacatctttcttatgcaatatagtcaaattttacattgattgtttacttctttgcaatttgaagtggatgcttttatgaattcctcactttctatttagtgcttcttcccatccccactcccaacaagggtggatgggttatttgttttggattttgtttgcggattacatttaataaagaaggaacacttgtaatttggtcatatgtttggtctgaaatatccaccctaaaaatcctcagcaaggggccacatttgtctcatttgtcatccatgacagttgcagtgctgatctgcactcacgttcctccaagagcttgttaggtcatttttatccaattctgttctacagtcaaaatcattttaatattgtaagatggaagaggttagaagaatctctgtttgcctcaaaaataaagattccttcagaacctcccacaaatgcacgttggcatttggtttgaatgctactgccccgagttatctgacctcagttcgtctctgctgtgcacttgccagagacgaacggttgaccagatgcctctcacaacatgatgttgtcaagtacagaaaaatgactccagtaaaaataacagatttttgaaaatttaacaagcaccaactgtagtcatgttcatctggttctgttgacagcaaggtttctctttctaattaataaaagagagaagaaacaaaatattcaaaataggaaagactagtaatagcaagaattatatttttcagaagtctcctagaggtagttcttctagagtttttgtaacttccctgaattgaattgtaaagaaattggtgtcatctcagtggctgatcactgaaaccctaaaaattatgggaatgaccacagatcagtcacatgtgaactcttctttttcattttagtggtctcagctccaaactctgggaggaaaatggtctatttgcccatgttctcctgtctaaattgttagagtcctcccctcctctcttcttcatgatacttcaagaacttttatgttcatattatcatgtagccatggtgttacaatgacagtgacatttcctgtggtggaaagataccggttcctctaatttggtcttccttctcttctacttagaacttgcttgcaataggccagacatagtggctcatgcctgtaatctcagtgctttgggagactgaagcaggaggatcacttgaggccagaagtttaagaccagcctggacaacatagcaagaccacatctctaaaaaatttttttaaataaaggcaaaaataaaaaactgcactctaagcttatatttttctctatttagcactctgttcataaacaccttaaccatctcacttgatacaaattttgtgacattacctgttggcagcttgctgctaaaaagtggctcaaaaaaagggttcagttataaaagtagtaaaagtagtaaactaggaacatcaagcttgagaggagtcaagataaaacatatccatttgatgatttaattgataaaggtgttaatttggctgaggagcagctaatacttgataggttaatattattttaatttctaatccataattatgaatcaatttgaaggattttttttttttttttgagacggaatctcgctctgttgcctaggctggagtgcagtggcctgatctctgctcactgcaagctctgcctcccgggttcacgccattctcctgcctcagcctcccgagtagctgggactacagacaaccgccaccacgcccagctattttttttttttttttgtatctttagtagagacggggtttcaccatgttagccaggatggtctcgatctcctgacctcgtgatccgcctgcctcggcctcccaaagtgctgagattacaggcatgagccactgtgcccagcattgaaggacatttaagacacattcttaaggggtaggtttctggtgtgaattgttctgctaaagtgagagatagcaacatggcatagcactgtggtgggtgaaagggaaggtaggagagctgagctatagtccagccatattgccgcaagacagtagaaggggaaagagcatgaagcaagggcatgggagcttatcctggaccagcctgagcacacatcccatctcctcacactccattggttggagtcattcacatggttgtgcctatgctgcaaggcataatcatgtgagtaaccccagccaatggggtctagtcgtgaggagatgggaagtctagtccagctttgtttccaggaagaagcggaaaccagctacaccgagagctaggtatctcttgccagcacagaccagacaaagacagataatttctgggcctcagtttactcacctgtaagatgaaggagtgatgcctaaggttctacttgtaactttcatatctgtgatgccaacttggtattagatctgatttagctacacatgtgcatttaattcttaaaggaactgtccaccatttaaaacatttttataagctagtgagacgtggcagcatccgttttgttcaaaagatgtgtcgtgtggagttctttcctgtgcctggcaagtgggatgaggtaggtgcttcttgcccttctccacaccttcttgtaccctttcccctcttacttaaccccagcaggctcataaacaaaacacaacggaaacaaaaaaccaagagaacatcaccacaccatcatcacccctcccgtccaaggtaattttgaacatgggccaatttcctttaggataaaggccatgcattctggcagatccctttggaagtttgaagccagagtgctgacagtcaagatcttattgaatggggctgcctgcagaggagccagtgctgattaacgacacacacacacaagccgcccaaagaatgttggctcttgctgggtcactgatgtcatccctagcaacaggtggcagccccctttctctgagccctcctcgaggaggtcctagtgttcccagtcatgaatgaggaacaatgaggcatccacggggttaactgccactttcactcactcctttgtggagctggggcttttcccatagaaatgtcattggcctgaactgatttctttttttctactgcccaaatgtcagactctcatataaaagtggatcatgtgcatcttttgccaccaaggccttttcaatagcagcataatgatgtgtgtgctttccttgtgcaaatagaggtgagcctgtctcagggaagggtaacaggatgtgagcctgccttgggctctccattaggaaagatcatcagagcagcatgaaagctgcattgcttgttgagctcatattttacctttatttttgtctcctctggtttgggagcagagcgtgtctttatgactggaaggcaagataccaaagttgcaagaacttatccagagttcttatcagaagttgccaaatgaatacaaatgaaatacagtagagaattatcaggatagtggttggccaaatatgacatcaattaatagggctcaattctgttacagcagtaaggtagcctttttgcaaatacacatcttcaataccttctatgtattctgcacataaaatagaagacacaaagaagaataagacatggtctttacccataggagattcaggataggatatcagagtgggcatggaaatctctatttctccaataatccagatggttccaattcacatgggcctaacactgtgtcacatcttagtagaaagagagattgccatggggatggagaaataagactgggtgttggactcacaaatatgggcttgtatctagactccatcacctgcaagctgcgtgaccttgatcaagttatttaactttcctgaacctcacttttcattatttgtaaaatgaaaaaataataccttcctgcaggaccttcatgagatttagaataaatgtatgtcaaattcctagcaccatggatgacataatttaaattacttagcaaatggatctgtttttacactaggcctcagctacttcgatctcttatatgtaaaatgtgaggattggatcagataacttctgagcaccttctaagctttaatattctgtggtgccacttcagcattggtgtaaactttcaggatcggttgtatcgagcagcatttaagttccccaacaagggaaggaatctctttcttagggattgggtaaaatgtggaagtcatgagctactcagggcacttagacaatagcaccaaaggatacctgtgggtagacatagctgttttcagttattttaatttacaagattacagggggtcctgtgaagcatccctggttttccaagacaccttcgaaagtaccatcaactttgacttttctagatcttttttcatcttacttgtggtttcaccctgttccatgctctaggataaagcatctaagttaactcttgcaacctcaagtaatatgttctttttacctggagaattaattctttcacccttgaaggcttgggcttggcttcagacagatcccggctccaaagttttctagctttgtgatctcacaaagtcccttaatgcatgtagagtgatgactgcaaaatgcatactacacagctatagtgcaaattgaatgaaataactggtgcctctgcaagcacataggggagtcctcaatactcaacagctcccttttattatttcataggcaagcctgtgtgcattgcgtttatgccttcatgaatatgcagatattgacaacatccctcttatgcctcttgatcccagatctggtctgtcctacccagaatttatgctttaaagacaataccagttcctcagcactttgcctgtctttgttctgaccccatatgaacaaaaagccagtttttgcattctgggttagggtaagaggggttggccagtatatccagaggtggggtggtaattaacagtggttaagaacatgtgctttcaggacaggcaatcctagtttccaattccagcccaatcacttctagccacaggccctgggaccaatcatgtactgtctgaactgctgctcctaatccataaaatgggaataatcataccaaccttgcagtgtgattgtgaagattatatgagagcatggaaattaatcgctagacagctgttactactattattcaaaataggcagcatggactgcagaaggaaaattaatcggaagtccaagacctaattttgccaccagttggccacatgacttcagagaagccatttaacccctttgtgtcagttttctaagctgtcaaatggcacaaaaattattcttgtatgggtaccacagtggtgttttctggctagaagataacataaaagtgctgttaatatttttattaatgctctaattttttctttttgctgctgcccggagatggctgctgttcctggtgacttggcatttgctttataaacatacttttgaagcacaggcagcctcttgtttctcttaagccagtatgtttgtgatagggaggttttattgctttttgttgaaataactgttttccattctggagcattccttaaaagcagacttcacactcacaaatttcagatcctccatgcccatcagcacaaaactagagcctatccctatccaattatacaaaatcactgtgcagccttttccagatagggatctgcaactgcgttacatgtttctttattaatgaaatgctgcaaatagcatccttttagaggatactcaaattacctctgggaggaagcactttgttaatgtgtcgaactgccttgtttggggggatgagttgtgttgacatatcaggtatccttttgagccagctcgcaagtgcctgggaattggggccagactttttcatgacacaagtttcctgaattccattgcctgaaattttctgtagcagagtggaagctagattatttaccttgtgataacatctgcaaaagaaatggcttgagtttcaaaagagaaaaagcattttataaatgggtcacacctgtggcagggaagtgagacaggttagggtgaacatattgtctggacataaaaacactctgtgtctagctggagcttattcacaggctaggggaaggctcaggaagcctctgaatcccaggctgacaatcagtcatgtcactcctttcctcaaaaacccttaagtagctttccattgctataaaactaaatttttaaaaaatcccaagcctgacattcaaagcccctgcatgccctccagcctcatctgacaccatcactccttggctcacggtttttgttttttgttttttgttttttttttaagacagagtctcgctctgtcatccaggctggagtgcggtggtgcaatctctgctcactacaacctccgcttcctgggttcaagtgattcttgtgcctcagcctcctgagcagctgggattacatgcatgcaccaccatgcccagctaattttcgtatttttagtaggaacggggtttcgtcatgttggtcaggctggtctggaactcctggcctcaagtgaaccacccactcagtctctcaaagtgctggaattacaggtgtgttgactcacactttgaagccacactagccttctttccgtttcactagttcatcaagttttttctttactcaccaatttgtcaccataattcattcattaattcattccagaaattatttaataatggaaacatgctggttactgcctagaacatttgcccccgtcctcagcttgactaaattgtgtccttctcccaggactcacctttaaggtctcttgatcaaatgggccttccctgtacactgaaatctaagtttggtcctctcatcctttttattgcattcactagttttccttcaaagcatttattgtttccaatcccatatttgtgcacttatttgtttaacatgtgtctttcctgctagactgtacattccatgaaggcatgcatcggatctgttttgctcttcattatatccctttacatttgagtaaggtgcttagataatagtagtggcttattaaataacttctggaatgaatgaatgaatgaatgtggctgggtgcagtggcttacgcctgtaatcccagcactttgggaggccaaggcaggtggatcatctgaagtcaggagttcgagaccagcctggacaatatggtgaaacccagtctctactaaaaatacaaaaaataataataatatttacctgggcgtggtggtgggtgcctgtaatcccagctattcaggaggctgaggcaggagaatcgcttgaacctgggaggcggaggttgcattgagccaagatcatgccactgcactacagcctgggcaacaaaagcaaaactctgtctcaaataaataaataaataaatattttttaaataacgaatgaatgtgatttctaccatgtttaactgctaaccaaacagaaaaaaatattcagtaggtaccttctcatccccagacctactcatcaaatcacatttcacaggacttggtattctcacatcatgatcacatttgaaagacccttttagagtcaggcatccatccacatgctctgcagcctgcccattgtcagatgggcaggaaaatctagaagaaatatctttatagcagaaatggactttgcagtgtttccagacattgaaaatgttgaagtaaatattgctgaagacccttccctttgttttaaatggttgtctcttagaatggaaagtctctggaaaccatattgttgtttaggccctggtgacaaacaaagtagcagaatgagggcaggtctttgtgccaattagaattgccaaaaaaatatatcagtcagcatagtggtccccacccctttgcctctttgggtgatacacagatacacagattaaggagcatatttagaggcaggtgaccatgatggaacatgaactgaaatatttgaatctgagagaggaactgggacataacaattatctttggaagacaaaggagaggtcagtgtttgtcatcacatattccaagaggtgccaagcagaacaggagtagattttcttttgttttgctggaaggcggaactcagttaatattataggaatccatctttcagtcactgtgaggaggaatttatgattcctcttttggattccgaagtaaagggtaacctgtcataaagctgtaaggagaattcaggtagaggttggttgaccatctggtagtgatattgcagaaaggattcatgtattgattctgagatcaactctaaaattttccaactctaacagttaataattcttattctgttttggattattactaaaaaccactcatcagtttgatttagcttttaatttaggctactttactatagaccttgggttcagaaggtcaagctaatttttcatattgattttaaaaagggaattaaattgaaattaggttatttcctcaattttataagaccagctcatatttggggctccgcaaagaagtcataaactacaaacatttttctaagtgtcatttttatttatactttaacttaagtatccaattatgttcaattcaataaacactagtgaacatccactatatgtattcatccaacgaaactctattgcatatttatcatgggctacattgtattagatagtgagaatatagctgttttagataactcatggtagagttcaggcaagtacatcagcaataacaggtgttttgatatggcagtatacgagtgcaaagaagactgtataagccatcctgggtgacaataaggggttggggagacttcctagtgggggttaactgataggcactcagatgcaaagatggttgcctccaaaagtttacaattaagttggtattttggtgttcagaagatgcctcaatggtgctatgctatgttagttttttatggtgcactgttttcttagctatgacatgatctctatgcattacttttcaaactagtctggactccaatcctgcaatttaaaaaaattttcaggagtctggaatggagatggtcccaaatctgaacattggtaggaaaccaggtgagtgaggaatcctcctagacttccaggaggataagattgataagtttctatgtacttatcaatagaaacacttgttttgggccaggtatggtggttcatgcctataatcctagcattttggaaggccaaagtggttggatcacttgaggtcaggagttcgagaccagcctggccaacatggtgaaaccatgtttctactaaaaatacaaaaattagccgggtgtggtggcacgtgcctgtaatcccagctactctggaagctgaggcaggagaattgcttcaaccctggaggtgggggttgcagtgagctgagatcatgccattgcacttcagcctggttgacagagtgagactccatctcaaaataataataataataataataataataataataataaagagacacttgttaagacaaatactgggtgtgatggagaaagaaggagtttggagatgtggaggatggaccactgtgatattggttcctctaaggagctcctgagctttaggacaaggagaaagaaagagatttatgggtgtatactatgatgcacaggaaagcatggattttagtgctctgagaaacattgagaccctggagtcagtaagttaactactccctcttttccccctactcactctaaccctgcttattggttctgaattatgttactttaccttactccttattttaatattaatttaattaattttttttaatgcagagtctcactctgttgcccaagctggagtgcagtggcgtgaccagagctccctgcagccttgaactccagggctcaagtgattctcccacctcagcctcccaagtaactaggactacaggcatgctccaccatgcccagctaatttttgtattttgtgtgtgtgtggagacggggtctcgctatgttgctcagcctggcctcaagctcccatgctcaagcgatcttcccacttcggcctcccaaagtgctaggattacaggcataagccactagctcagcctctttatcttacttcttcaaggcataaaatgatctagaaaaaaatgcacataatgaggattttggaaggagcacgataaatgagttctgttcattaggatgtcttcataattaggccctcctctgagaattagaactgctaggttttattccttgttcctcctctgaaattgatcttcctctgtctcagttttcttatcattttagtaggatgagaatgcttgttaccctcatgatttaaaaaggtgccctgaggattcatttcctacagcttcagtagttgagaaatctaattctcaagcaggaagcatgagtattattctctttgtggtccttgagaaacatttatcgtctgtttgctctaccaagaagccaaactaacagtgagaaaaacttgtcttcttagttttagagagcatctcatctgtgcaattggaaaaagaaaacagttcctaaatgtatagcttggtcatttgagaatctgttctttgcaactatatagtggtgaacttcacagtataggagaaggacctaaagttcatcttaacaacacttaaacttaaaactcaatgggcagcaattaggagaaatttaaagcatacccaagaggctccaaaagtaaatatttctctgggcagatgtgttatagctgaattaactgggtgtttgtgcaactgcaatgaattggagagataacagtctttattgcctgtagatgtagcctgtgatttcaaaatacaagcggtgttaaatgttcccagtagaggttcaggcagtttgctaagcaaaccattgctgctgccaggttataatcatactgtcttaggttatttgtccaattctaagtaatgaggttcccatcaccctccatttgaggtgcgtttatcttacaagaacttgggtcaaattgaacttaaatttaacttgatcatattctccgctaagaaccattcggagaaaagtgaaacacaagattcatttctcttgtattatttcttgtttaaaggttttgcaggagaaaaaaatcatctccccttttaggttgattgggtaattttgggtgatcactccagtctctcactttagcaagtgagaaaactataaagaggatgctgctgcctggatgttctggtcttttgttttcatcctgagactgttgacaggagcaaccttctgtgagatccctgccaacatctaataataggagagggtggcaatgagcatagagatggaggccacagagataagaaaaaagaaagtacggatgcttttaaagcagcgagcagcaaatatctgttctggcttacaataattgttgttacgtctactgtaatataatacatttaaccaaaatgaaaactattccaaatggaaactggtttagtttgggcccagcagaggacaggataaggcagttattcgcatgtgcttgtcacctataatgcttcaggcttcatgctagatgctttatatgtatgatcataatttatatttctaataagcacatacagttggtcttattcctcacctaacaaataaggaaatagagtctgctcagtgtcacacagaaatcaaaatagtaaagtttggactgaaatccagtctgcctggttctggttatcttaaaatacagctaagcccctcatgattgtcactcagaggtaagaaatggcaggtcttatatccaaagggccacacctggaaacctcctgaaagaggtaaaattacctggtgcccggcctgaaaccgttccatttcaatacatttttgttgagtgaatcaaagaatgagatgaaatttaaactggactctgaaataagtaagattgagaagaagtggatcttagtcaaagtgagattgttcaattacgggatggctggagaacttattattgtgtattatttcttattcatagctatatatttaggcctgaaagaggagagactttaattgctgtttcattttagctgaaaatactttctatttgaaacagattatttaaagttgtcttatttggactctctcatttatatccattctctcaactggcacttattaaagtactaagtacaggcacagtgcaaaggagagttagaactggaaagaaaggctgggatctggtcataatgtgctctgaatatcaggttgagttgggactttaggctactaaagacacagttgttgaaatgtcatggatgatggtaaatggatgagctacgtggttaaactaggttattattatccctgttacaggcgagatactgggtcacagagtgcttgtgtgacttgcataagatcataaattatctaaggcagaaacttagatgtttagccttgttctctgcgctctagagctttttccattttcttttggtgcagcctctcttaccaaaagccacaaagtcctttaccaaaaacagtgacatgatagaagaaaagagatacagaactgccccatttatacaggaagaatacacctgggtaaaagggatatgtaagtaagagatccttgcccggaggagcagagagttgctctgatagtctcatttgcaagaggctaaaatgaactctgagatttgaatccagtccattgatacaaatgagattagatattttaaccttcacactgacctcttttgtctgatggcagcagttacatccatctccctggaattttctgccagcaggattatcttttgtgctcctataacagaatacctgagaataggtaatttataaagaaaagagctttatttcttgcagctttggaggatggaaagtccaaggtcaagaggtttgcatctgatgagggccttctttgctgtctcatcccatggaagaaagcagaagggtaagagagcaagaactcacagcctcaagaccttttgtaatgttactgatggaaggtcttgactgctgatcgtccaggttattggtgttttgaacaaataattggacaaaacacacaaacgatgcaatgacagaatgaagcaacaaaagcacacatttattgaaatgaaagtacactccacacagtgggagtgggctccagcaagtggctcaagagtgctggttacagaattttatggggtttaaatgctttctagaggctcctcattggttacttggttacaccctatgtaaatgaaggagtggtcccaaccagactgattgactgtgggaggtgaccaatcagaggctgaagtgaagttacaaagttcgctttgtgacttcaaagttaattacaatttgtaactacaaatgtgtaactacaaatcaccctgtgcaaatgtctggttgcaagagggaaacaatcagaggctgaagtgaaattagagttacaccctatgtacatgtttgattggttttgggaggggatcaatcagaggctgaggtggaattacaaagttacaccctttgcacatgaagactggttgcaagaggggaccagtcagaggtacttctcatttttcatctgggaggcagtgcaaagggagtagcctcttagccttttgttatttgggtgtggagaggtggagttttccttttgattcagttctaggaactcagtgtgaatcggccttaggctctttacctccagaccctattctccagcctcattaattagcatcaatccatgcatggaggtggagccctcatgatctaaacacttcccattaggcctcccagtgctgttgcactggggattaagtttcccacacgtgccttttgggagaaactttcaactgatagcaagaatgctgatcttgaggcattgctatgagaccaaacttctaataatgactttttttaatagttggccccttaagactccgagttttttaaataaaacagagctctaaggctttcttaaatatattccaagctctccatgttcaattaataatttaattgcttagtaatttacatctgggtaattatgtgaaattatagaagttaaatatacttttttaacttttttaaatttgcacaaatttatgtggtacatgtgcaattttattacatgcatagattgcatagtggtcaaatcatggcttttagggtctatccatcacccaaataacatacattgtatccattaactaatttttcattatcctagctttctcatcacccttctgagtcttcattttttatcatttcactctctacatccatgtgtacacattttttagcactcatttaatcgtgcaaacatgtgatatttgacattctttggctggcttgtttcacttaaggtaatgacctccagttccatccatgtcgctgcaagagacatgatttcattccttttatggctgaatagtattccattgtgtatatatacattttcttcatacattcgtctgttgattccttaggttgatcctatagctttgttattgtgagtagtgctacaataaacatatgagtacaagtattttttttttggtttatttatttatttatttatttattggaagataaccagtagtgggattgctagatcaaatagtagttctatttttaggtatttgagaattccccatactgttttctataatggctaaactaatatacattccctccagtagcatttatgagttcccttttctccacgtcctcatcaacacctagtattttttgtttttttaataatagccattctaactgaggtaagataatatcttactgtggtttaaattgcacttctttggtgattaataatgttgaggccaggcacggtggctcacgcctgtaatcccagaactttgggagtccgaggtgggcggatcatgaggtcaagagatcaagaccatccaggctaacatggtgaaaccccatctctactaaaaatacaaaaaattagccaggcgtggtggcaagcacctgtagtcccagctacttgggaggctgaggcaggagaatggcatgaacccgggaggcggagtttgcagtgagccgagattgtgccactacactccagcctgggcgacagagcgagactccatctcaaaaaaaaaaaaaaaaaaaaaaaaaaagttgaacgttttttcaaatacctgttagccatttgtatattttcttttgaaaaatgtctattcatgtcctttactcaagttttaatgggatttttttgttgctgttgttgtttcttgtatattctgaatatttgtcccttgtttgataaatagtttgcaagcaatttttcccattcaacaagttgtccattcactccatttattacttattttgctgtgcagaaattttttagtgtgattaagtctcatttttctatttttggtttttttttttcatctatgcttttgagatcttggccataatatctttgcctcaaccaatacccagaagagttttctttaggttttcttctagtatttttataatttcagatcttccatttaagtctttactccatcttgagttgattttaatatagagtgagaaacagtggtccagtttcattctgcatatggcaatccaattttcccaacaccatttattttctgaagaagctatcctttctcaatgtatgttcttgtcaactttgtcaaagataagttggcaataaatgtgtgactttatttctgggttctctattctggtccattgatctatgtgcctatttttataccagtaccatgtggtttggtttactataaccttgtaatataatttgaagttagacaatatgatgcttccagctttgttctttttgcttaggattgctttagcttttggggatctttgttggttccatatgaattttacggttttttttcctaaaaaattaaatgtacttaataactatataagggaagggcaaggaccacattgagtacttgttgcattgcaagtgcttgcaacacatctcatctcaattcatattcactcttcttcccatgaggtagatacaaactttttcattgtttgggtaaaaaagcttaagctcacagagtttaaaatcacttgcccaaggtcatttaactgggcagcagggaggcttggtactgagcctggatccttctgactcccattcactgtccttcttgctagttccctgatgggaaacatctagaaacttttagtggtagagtcaaaaatggtactaaaaacattcaatatgaaaattcaaataggacaaaaagcatgcagaatatttaaatgcaaggacaggagggcttcagcaatgtttggaagtattttttatatagacattcattctttcattcaagagtcatttagtgagggcctagtatgtgccacagcactcctagctgccatgtatatgacaatgcatacaaaagatcgagatgaaatgcctttttgtaccttacattctagagaaggagctagacaatagataagtgaacaaatatgcccacaggatgacttcagacagatagggatggatgaaagtaacacaaagcaggggagactttaggtgatgtaagcagagaagggaaggattctcttgggaggtgacatttgaactgggatctgtttgaaaaagaaagaattagccatgcagacatctgggtaagagaggaggacaggagaagggtgttgccaagggaaggtcaagggcaaaggcttatggcagaaatgagctttatgtggtcaaggaacacgaagaatttcagggcagctggaacctggtaataaatttgcaatgctttggtgaatttagtagaatgtatttgaggtgtaaagactttgctttcagaagaaagaggttagcaagtgggagagctggaaaagcccataacctaagagcagaagccctcagaaggaagtagcagaaatctaaatggtgaaggtgctgcagagctcttaagagaagcatggcatttgaatccctttagggtctccttcagctaatgggacaccacatgacatttaattggattgctcctataagagctcaacggcttaagacagaaaacactgccagcacatcaaatttgcacttttctgaagcagtatcagtgtgggagggaggaggaggggggcccaaactcactggacaatgcaaagcaagcttagcttcttatctgaagatgcctttccagtgaatgaaagaatgagacagaatagaaataaagtgtgaaaatggggaaaccatccctgtgcactttcacatattgtggttacatggtggagtaattctacagaaatagtgaaagataaaatttaaaaaggagtcctgtgtctttgtggttaagaataaggattctggagtcagacaacttgagtttcaaatctcttctcacctactcattgcaaaaccttaggcaagttacacggtcttgctaagattcaatctcctcaactacaaaatgggggtaagaatagtatttagcaacttatagtaatttagaattgttatgaggattcagtgaaattttgcatgtaaagtactcagcatactgcctgccacatagggaatactcagacaatttaattggttgttaactatgtcagggaaaagctgtgagtttttagaagcatgtgattatgtgagaaagaaaaaaaatcataaagcagttctgagtgtttttgagcaggcgcattacctaattggagctaagcattgtttgaatgaatctaagtcactgctcctagctgggccttactttcctcacctgcaaaacattggatgcagagccaacgtaataatcgctctcactcatgttggttcagccttgacaatctaccatttgggaagttaatcacaaatacttggcattcagttgcgaactgaaactagggtgatcaaccatcttagtttccttgatattgagggatttcttgggaagtagtactgaaacttttcatgctaaaaccagaacagtcttgggcaaacggggatggttggtcacccaacaaatgtgttctgagaggaggacaagggaatggggaggaagtgctatttaaatggtatctgggccaggtgcggtggctcagtcctgtaatcctagcactttgggaagccgaggtgggcagatcacctgaggtcaggagtttgagaccagcctggccaacatggcaaaacccagtctctactaaaaatacaaaaattagccaggcatggtggtgcatgcctctcatcccagctacttgggaggccaaggcaggagaattgcttgaacccaggaggcggaggttgcagtgagctgagatcatgccattgtactccagcctgggtgacacagcaagactctaaaaaaaaaaaaaagtggtatctgactggcactctccagcatttcctgcctgttttattgtgagggttatttacttgctttctaatgtggtcttggtccctttattctgaggatgacaggaatggagtggggaattttcccattgttgcccacaatgctgtttcataatgtatgaagacacttccacactgaaagttaagagagctgactgattgcatgcccctaaaggaaaggatatttcttttcttccatttccaacaatatgtaaaacaaaattctagggtttcccctaaggtctcctgaggtaacttggggttgggaccagggttcttcttccctgtatgattttcctttcccatcagagtatggtaaaagtactccttttctaactggaaaacttctactcatcccaacccaagagatcccttcctgggaagccttttcttgcacccccagctgttgttaaggcttcacccctctgtcccccatgttaactttttgcataatttcacccgatcctctaaccacatgtctctatttattcaattcccatttccccttattctcagcatccgttgaaagccaaccaccccagtgcctagccagtggtagggctggcattgtagtacatatgatattttaaaacctaagcccaaaatggcctatgagactatggaatgcagcttcagttcgttaatacagaaaccttccaacaactttctttttcctggaaaacatgaaatacattaatataatttcaaaccttagttgaactagctagtcccagattttctagtgccaaggcattaatgtgattcaaaagaattaaaatcacagcaaaattaaataatcttgttgagtggatgctaaacccggcacgagttccatgacatgtagcatcgacatgtacaagtactaattatccactaattacaaccacagtagcattgagctggttttccctaagaatgaaggactgacacagagctgtgaatggtttaaaaatccactctcaggctcaatgcacagccatttgttcagaagatactgaatttttcagagtgcgaacaaagaagatgaaaatgtcttttaatctgggtggcatgttcatttgactagttggtttttaaatgggtacctcttgtgtacctacccattacaaacccttagtcccaaagaaagactgctaaatggctgaaaatgtagaagaaacattttgcacctattctcctgggaccattgctgaactgcatgggtggaatggagatcaatcttgggatgaaaagtaatggtgaaaggaaagaaagtcccgggaccctggacatgagtgcccagcagacccactgccagttgcagctcttaattttaaatttgccatggggtgtgcacatttcaggtctgccaccactgttcttgtttctgaaacaggaggaaaatctgaacaaccttcttccacttctaccaagggaaccagtaaagccaagcaaatactgtaattacagtataccagttcagggcacaaatttaggagtcgaacagatctagctacttagtgatgtaacactcaacaaatgatatgtagttatatttatcctgtggataactatggaataaacaagctagatatagatgcttatggcagtctttggtgcttcctgcctctccccacacccccatactagcccctatcccatagagccggtatttgcagctatctgattcttcctgactctttcaatgattctctcatttgatttacatttctttttcttttctgaacaagaaactaaaatgccacctagctcatcttttctataagacatggatgatatatgcctttagcacatttcttgctagattcttagtagagttttggaaggattaactcatcaaactccagccagggagtgtgatcctacagggcgctttgtcttatcctccatcttgatatgtatcgtggggtgcttggtggacctacagaaatcagagactgactattttttgtaacctctcttttccttttttaaaatgttttttgagaaatgaaacatgggctgagccctctctgataggttatcaatccctacttacacatgacagattcttgtttaaataacataatttagttaaacaaaaagtaaaaacaaaagaggaataaaatacatatcaaaaagaatcaagataaactcattagcactggcaatctgccatttccctccattaacctcaattaaccaaacagactgcagactctgacatgacaccaaaaaacatggctttttatgaacctgtaacattttatgttaaaaacccatagcaataatcatcgcagcacataattcgttctgaatttggaaacttttcccaaaaagtctttacaagccataatataaatgctaaatgaatattcccatatgtatagaccattacctgctttggatggaagcatgtgtgtgtgtgcacacgcgtacatacacatttcattattatatatttatttgattgtgtttactatatattatatatttaattatttattattattattatagtttatttagtcaatagaccaatatttattgatgcccttcatatgccaggccctgtgctaagcacaaaagatacaatgagtagcctgggctcttaaaaggtattcctttaatgaacattaagtgaataaaaatatggttgccctggagaagtcacagtctattgacagaaaaaaacatgtaaacagaatacaaaatggtataaaggaattgtttatgaagtcccctgctaaagagcagagggaaaatacaaggcttcttccctgacttattcagcatttcttccaaggagttataaagcagttataaataatactaatctctcctttgtttccacttaagtttatatgggaaaaatatcatatgttacccctagtgatgaagagattatttgctcctccataaaataattgctgtgttacagaggaagaaactgaggtgcacatttttaaagacttgcccaaagttgtattggtaaatgattaagcacaaattgtatcattcttatgagagatggtacttcctccctgagaacagaaagacagtgaaatgccactgattcagactctgaggagcacgttgtagcagctgaaaatgtggatttctagaatatttcaggaaacacatatttactgctctcaaataaacacataaggttaatgctaatattagcatagtgttgccaaacaaaagacctgcttggacagattctaatgaatagttacataggctgtttgcaattacaacatcaaaatggtggttgttaaaattgaagtgctctgcaaatggtttatcttgagtacaataaatattcccctgagacctcttcatcctgttaatttacctaggtagtgcaaaggtaaactccaaccagctttggaactgttatatattctcagacaggtgaaatgaaaactaatggggttttacaatgtaaatataaatttaagacaaaagggcaagtttgaattaagtgaaaattaactggaaaatatgtgggtttttttaaaaaaaagcattatcagtcttctgacagcattcaaagctttccatacgagtgatattttttccaggtttttaaaattgagtttcaaaacatcactcctacctaaggggtcttgtataaattatagagcaaagatgatcttaaaggattgcatgcctacaaagcacacatgcattttcaagactttgcacattctctgagtaatttgcactttatccatcctcctgattttatctgtcagatgaaaacatgtagaaacaaatcatttacagtgacatgatttctaaggggagtgcagtggctgttttcacacctcaagtgtgtcaggaattacagaactttagagtgttcatctgaacaaaaagaaacttcaacttttagtttcctggttattaaattttcagacattttgggggttgaacaatccagatacaataaggttttcctttttaatataggctagaaatagcaccccagggctattagggtttttaataaaaataaaatataatacactgctttttgtagatactgtgcctgctttttaaacagcatctgagtacaagccactgtgccaagcacctcagctttattgtttctaaccgagcctctgaggaacctagtattgtccccatttcagagatgacaagactgcgatcagagaagttatgtaagtttccttgtccatacagctaaaaaatagcagagccaggacttagacccaagtttaccgtttttgttaagcttctgtctcgttaatcttaaatggagattggacattttgacttttcacaacttctctgtcagattcttattaaacattaaaggcccagtacaaacacagctcattcctttatgttttctgattgtacaattcagcattaatctttccttcttagggacactcaaagttgtctagggtgtgtgttagatcttgccttgtactgtagtgattcttatatgtgtctacctctctcactggattgttagtttgatgaaggaaaatatagagacttattgttgtatctttttatcttttgccttgtgtccaaatgtgtttttgtggggaagagaaagcatctgtatggaggtggtgttccacctctgctagggagatcttggtggccagatggggctaggcagtgtgtaacgctataggcggtaaaagaaagtatgcctgaatgcagaagtgaaattgtagctgatggaagccagtatagtatgggaaggcagggcttcctgtcttccttgctaggcatgcctagcatgcctcagatctaaagtcaaaacaggctgggcaaggtgactcacacgtagaatcccagcactttgggaggctgaggccagaggctcaccttgaggccaggaatttgagaccaggaattagagaccacatctctaccaaaaaaaaaaaaaaatttttttaactagctggggatgatggtgcaccggtagtctcagctacttgggaggctgagtgaggagtattgcctgagcccaggaatttcagcctgtagagctatgatcatgccactgcactcagcctggatgacagagcgagaccctgtctttaaatattaattaattaattaataagtaaagtcaaaacaaacatggtaaccacatagtttagtcctttgctggaaggattcggatcagaacgttgtggaattcagatgatgacatacgggaggctgttcctggtgcctctattttattgtcctgtaaattattttatttcataaagttgagtgttgttcatgttagaaaaactagatatttagataagccaataaaagtaattactataaccccatcatccagaagataacaactagatatacagtcattctcacccctagctgaacattagaatcacctaggagaattctttaaaaatacctatgcctaggctccaccacataccaaataattcataatctctgggtgtgggaccctgacgtgagtattttttaaaactccccaggtgattccagggcacagccaagtttgaaaaccaaccatggtctagagccagtcatcttaaaattcctgtgcatacattatctaggtctggggggagcctacaagtctgcatttctaaccagctcccaagtagcactcatgatgctaatgcatgctatgcttcaagtagcaagagtattatatattatcctctcaaaaaaatgtaaccatgcatggataaagggattttttaaatcagtaagtctttgaacaggttacttatactgtaagcctcaatttccttatctgtcagatgacagagtgagtattaaatgttttagaacttttgctgcccaaatatttaggtgggaaggaagcaaagttaaaccattgaacacatatgatactccacacactgttcttagagctgataataagaatagtattatttgggcatgtagtatgtgccaggaaccatgctaagcatttttaattatttaatttagtaagcttcattttatagatgaggaagctaagtaacctgcccaaggacatgcagctgcctagaggtagaactgggatgggaaatcaggcagtctgatgccagagcctgagtactgctagccagtatactacaatgcttcctggactagataatctctaggattcatctatatagtggaatttagattgccagtcacttaggcttctttattttgattatccaatattcagaattatgaaaaaaatcttggcagaaagggaaagggggagaagtgcgccatattgcacatctaagcatgcacatcagtggtatgtaaatagcacctaaagatggcatcatttcatacgacatccttagtattggttcgccatctgtggcttaatttctctgaagaaatccaatatggcattcaaggtttaacttaatagcctagagacttcttcaggtgcataagtgcatcctcatctaggcagaatcggaaggcagaaccggagggctctgtgcagttgggaggaagaaccatgaagactggtgatgaggagaggaattgatggaagaacagatgggagtgggaagtatccaggtattctggtaaaattaggcatgtacacagcatctctggttctaactgtatgaatgtgtgcacatgcatgcatgcatgtgtgcatgaggatggcaagaccactgggtacaggagaggattatacagaggaggaggactttggaagtattgtctatcatacaagatcatcttcactactccctcccttgttggccccaccttacccttcactctgatgacaagtggacttgacccaaatgcttctaatcaatctagtgtagcagtagagttaggaagcagggcttgcctgaaccttagaactctccgtccaggctgtgggcaactccatctgtcaactaggcctgaagggaagttgccaggtctgtgccagcctctacagttttcctctgcaggatggcttgttccctttgctacctgtagcggctacagaatcctgaatccaaagggaaaatatttctggcagaaaaatactgcctgggatttccctgctgctaaggcagaattcagaaatgccatccattggcttgcaaagaaagaaatgaaatgtatctgttacagaaaaccaacagccataaaccatgtttgacccacagcatcttcatactttggtttaaaatgtaccctcacttttacagttttaaagcttctattagcatctcagaaatctctatttatgaagagaagtccaacttgcaggcttaagctccatgggtgatttccccttcaacttttcttaagaaaatttaatagcagcaccatgtgctcaattgagcaattccaagtctttacaaacctgatgaaacaacccttacttaagaagcatatctcgtgggggtagtttccagaatcctttttttaacccccttataactgatgttgtagctcttgtatatatatttttttctttctggtattttttcttttcaaataaatatcatccagtctgaaaatacatattacttagttgtttattttttaaggaaatgtgatacaactcttctctccaactttaatttttcctctactcctgaaagttgaatttactatgcatgcatttcatttctctccaaattaagtgcacagcctgatgtccatatgtaaatactgcagggaatattttaatgcttcttaatgggctgaagggaaagaggtggaaataggggttctagaagtcagaatcttatagaagacatcataaatgtgggaataaccagtgtgtgtattttccctatttaaaagcacgtacttaactgatatttttactttcctccttttgagaaatatgcataggatgtttaatttcatgtcaattctgtggataaataaaaactataacacagcatgtattgttcccgattgggtgacccacccaggtcctgcactgccgggcacagaaccattgagaagaaagtgtgctcagggaataaagcagggaaggaagaagactaatgatcttcttgtaatattccttatattactgtacattcttcacactgaaaagatgcattacgactttcctagatgaagaaactgaggcctagagaaggaatatgatttcctgtgatcttatgaccagttattgacagagccgattctggtacccaggtctcctggcccctagacagatgactttgccaatgctccacatcttctgctagggagataaaaaggaaacactgaagaagctccagagttagttttatttttggtttacgaggtttctttttttttaaagaaagagtcctctctctctcacccaggctgtagtgcagtgacgtaatcatagctcagtgtaacctcaaactcctgggctcaagccatcctcccacttcagcctcccaagtagctggaactataggtgcctgtctaattattattattaaagagatagggtcttaccatgttacccaggctggtctcatactcctggcctcaagcaatcctcctgccttggcctctcaaagcattgggattataggcataagacaccacacctggccaagagttgctgggtttgaattgtggtatagtcataaatcacaaattaacctcgggcaagtttatttaactgtttcctcctacaaatggagtcaaaataattcctatttctctgaaatttcagagttagaggaaaaattaaagttgtggtaaagacatgtattaggtctgttttttaaaaaagcaaccatgtaatgtatattcttagactatatgatatctgaactattgtgagataaaatgagattatgtatatgaactgtttaatatggtgcctggcacatattcagtactcaataaatattggatacaactatattattattatcctatttttctccctaaattaggtagaaatcaggatgggagagaacaatggaatggccacaaatcctttgtgcataagattaaagattaaaaatatttaatcagctgctgaaaaaaatttttaaaaggctatcaggaattgctctgatgacctccaaaaaacaggaaaacattaaagttattcaaaggatggaggagagcattcagacagctttaacacccatgcattggaaccattatggccactctgtataataaaataacattgagagttctggaagactacatccacatcaccttcattcagataaattttgcttggtacctacaatgtgccagtttctgtgttaaacaccaggaatacaacatgaataagatttattcaccacccttttgcttgtgccctattagggaagactgactgtttggaaaataattagagcaaaatgttgtgtgctgcaaaagtagtattttattcaaaaaattgaggaggcattgatctaagttgtgggcttagttgtgtttaaagacccaaagcctttgccttttgcagctgtagtctagatggagattcagatgataaatgaattaattacatgcaacatgccaggtaaggaaaggtccgagagggcttcacatagaaagtaacaactcaactgtctgaaaggatggtgaagggtttaccagatagctgggtacagacatgaagaagtgagaagcataggggatgggatgtgaagaacacagaggaaagaattaattgtcgctcacaaagctgataattctagttgtatttttaaaataccaaacccagcttccaacagtcttggagaattatgctgaaacagctaagacctgcatttcttcaagtagcacttaaagaaaatgtgaatgtcatggcagcagattacacagctgcgacccaggacacccacaggcagaaaaatcagggaaaagaagtcatccttacaagtatcacttctctgaccataactacttagaacattttgaattctgtttggaacaggcagccacattttcatgctcaggctgtttctcagagagaggtcattagattcttccatctccataacaaaaaatcaaaagcagccattttaaaagtaattgcacagttccagccatatgtctcccccacctccttattgagtatcattcacttaggactggcatacttcccctcctaaattggaggtttgcatatgtaattatatcaaatgatgtgtttgtttatatctccaaaccacattcaaaagcttgcctatgatttatctttgaaattcagtttcatcatgtcagtccccaatttactgtgcccagtgggtctacagttacatgtgtaatgcacacacctctctcgtatagattacagaatggggttgccttccccagtgatgagtcagagtggttgaggagggaggttgctctgttttgtcttgttctctattctctgtattttttcttgttctctattgtcttgttgtcttattctctatttgttccaaatgcattcagctacaacaaagttattataaatgaagaggtagcactggtcattttaactaattcctctgggccaggaaggatggctcactgcattcttttctgactgtaaaaaatggcagtgctgctgaggtgccgtagctcatcgtaagtaggtactttgagcaggaggaaagcttttacaccttagtggtttagctgaccctggcttgataaaaagatttattttatcaagattttgataacaagatgtatttatttattttcaactgcaaataactaccagttgttgctgtaaccgtaaaatttcaatgtttccatgttccagattcccatggacaagcccaatcagctctattcatttcaacccttcttcatgcctgaggcctaaactaactaacctattcattcattcattcattcatgtaaatatttttaagagcctaccttttccaaacataaaagacttattaaaaccttaaagtcagggtttatgattttctagtgatttttctaacagctttattagcatataatttacatgcaataaacttcacctattcaaaggatacaatttaattgttttcagaatatttacagaattatgcaaccatcaccatagtctgtaattttagaacattttcatcccttcaaaaagaaaccttgtacccattagcagacactccctatccccataccacctcatctgatttcctaccgatttccacttttaagttacattttatttcttgccttttatttcatatctatgaaaataaaggtggtagaagccaagagaactgtaacctgcagaggctttcctgtgtctttttactccaggaacagaaactgcttgtcttcctcacagctccaagttcactgttgtgtatgttgtttcagacttttcaggaagcctgtctctctctgttggctgatcaatatgtgagaaacacatccaggtgaaggtatgaaggtgaaggggaccctgcagctctcccagttacatgtaggcattgtgaaaacaagtgaatgtcctaaagaatcgccctgagaatcatcaggagaggaagctgacctcttccctgtgcacagccacaccacaatgggctgtggccatgtgaccctgggcaaggagcacctgtgatgatagagagtccccaggggaacagagggcaaaggggtcctggtcttttgtggccggaagagcagcagggtgaaggccaacagccctttgactcatttatagcctcaatataacaagcatgtctcattcctattgtggactctaatagaggagcccacacacaggagaggggaggctccatgaaagcttcccctgccttgtgagaagaaagttactccccactttgaaagagcctctgtgacatatgaccttgtccaatagaatggcccaaaaatgaaggtgtcagatatgtgtgttagacatccactggggtgaccacacagaccctctgtcaatgtgactcagagcgatgtgctgccctttattcctctcctcacttccccacagcaggcactcacaggctatctccatcaccccaccccacacccacacccactgagcccaatgctctgatctagatgctagagcagctcagtgtatttcattcttgggcctgtctggtcagaagaagtaaggtcaataaaaagtcacagtgagattcagtgaaagatagtggaattggatagtactttactcttagaatcagaggaccgtcacaggcctcaccccaagagattctgatacagtaaatgagggatggagcagggagacaaaaatccatgttttttacgtttccctggtgattccgatggtcagctaaggaaggaaagttactcatcctccttgaccttcttggtggcagtctttcctccttaatctcagacagtagctctttacatccaagagtgcctagtattgctcattcacacagaggaactctgcaaactttatgagtacacatgtcacacaagcctttcccacccacaaatacaccctccacacacaaaacaataccctcctaaacaaacacattccaagtctgtagcaaaactgaagaatagaatacagcagatctcttccagagcaacttttcattaactaagcattaatgagttcctattctttgttctaggtgaggaactaggtaggcatcagagtttccgaatcaaaagacaggcccatcccatgaagtaactctgtcaatttgtctagcgaggaaatactgacatgtgaacaaaggattctagtataaggcagagatcaataatggagagcactggttatatgagggcagagcagatggccacctaaccctgttaaacagggtcagcaaaggctaacatctgagctaaacttaaaaaatctagctcagtgtagtaacgtacagcttgggtgaatatagttaataatagtgtattgtacatttcaaaattgctaataaatttcaaatgtcctcaccacaaaaaaatgataagtattgtaggtgatggatatgttaattcacttgatttaattatttcacatggtatgcttgaatcataagctcattttttactatatatatatataccatgtgtatatatatatatacctacaacttgtcagtttacaatgaaaaagataaagaaaaaactctgtggggcacattccagaatgaattcatggaaagttagatcatttatacactggaaacacaggttttcctcctgtgggcagtgtggaggtggagaggaggggctagcttgtaaacagccatgttactctgagtgggatattattctgaaggccgtggggagccatttaatttcctgtggtatcttcttggctttctctaaaatctgtgtgctcccacccaccacttctgtataagacagaagcttgaggtcaagggctctttcacagcccctggaaatacctttccacattgcacctacctcaccagcactgggatcacgcttttcatatgatttttctctgttcctccattgtccatcagcatataccaggaaaacagcccacaccatattctctttagggacattgtggaatcaagaaatggaacataaatttgacctcctaattgccatttgacaaaaggaataataaaacctgcaaaagacaaattggtgcaataagctgagaggccttgaaggttttgtcttctcattttcttttctttgtctttatactcaaaggggtgattcacttatgagaaacaccattggaagaaaaggtagatatttttcatgtggaacttgttttgtataaagattcaaacacataaaacaaaatgataaaattacagtatgaaatcttttgtgtgtaagttattaaatatgaaataattatgtgtacaagtagcgattacaacattctttgtcaagtataacaaaaattatatgtgcatataaaagttaagtaagaaagtactgtttcatagtctgaatctaatcagcataaacaacctattaattgttcaggaactctaaaatctttaatgaggtttctactgtagaatttcagtcatatgcaaatgaatcattggaattcttcattatcttaaaaacagaagtttttttagtgattttttacatccccaaagtgggatgtaccccaactgtggtagacaggctgaaacaatttttcaggttttctttgtaaattttactttcttttaagaataattcttgagaccattctgattgtcatgggggattggaaagttacagttccataccacttttgcttttcctttaactggacttgtttccccacactcagtaagctgtttgccccagatatttaaaagtcaaatattctcatttctacacaggtctgattacaacaacttcaaggaaattggatcgagaacagcaggcagaacattttctggaggtaagcgcatagagggaactgaaattcattaaaactgactttcactaaacttctttaaccttcaacataaactacaccttcaatatatttgaacagtggatatcaaagtgaagatatttctcttgggctgctatgttctgaatttagggatttctagtgtgttcttcccaacatgctcctgtgtgctgagccagggtggtagggcagcctttgccttttgctgaaggcaatggtgtatcaccgtctctgccttgacttcaggccctcgtgtcaataatcagaaaagaaagttcaggagcagagccctgtgagccacgggggccacagacgtaaaaagagaaagagcgtcagtgtaccatttatgaggaagctttgctttcctcttttcttttcgtggggagagagttgagaaaaagaaagctgctggttgagtcactgccagagatgactattgctgaaaccataaaatggactcctttaattcattaagacagaaactacagcaaaatcaactctaaaagtgttatttctggagagagaataaaaagctatgagatgagaaaataaatatgaaagagctttgcagcacattctttctttaagcatcgagtgtctttattgggaagcttgaagcctgggtagtttgtatgacaccgtgatttaattgtgactgtgtgatatgaaacagatgacgatgcttagaactcaaggctctgttaaggttttataatgtgtctacgcttctaaaataatcttttagttcctaagaatcactttctggaatccactacccctcctaacacatacacaaacacacatacacacacacacacgtgcacatgcacacaaacacacctttcaaatctgatgatagaatctcttctggtctactcctttaaattagctcaccagtcatgatttatttaaagaacaccggactaggaatcaggctacctgggtcttgaagctgccctgctgtgaatagcttgaagctatttaattgccttgaaccttagtttcccctactatgaaatttggcaaacaattacaatcctttatacctcaaaagatcactcttaggatcaaaccttctgttttgtatcaacgtatttttaaaactcttaaagcattggatataataaaggattattattattattatcatcatcatacaatactatgataatccttttaaaacattactatcatctcataaagataaaaggctccaggctgccaaaaaaaataattatagtaattcttttttcaaaatccttttaacaggatgcagtacctacctggtccagaacttaaatacatttgccagaaaaataagaccttatattatattcatgggcttctttcctttccagaagacagtccaggacacctggaaaggctgtgttcttagatagttgaacccattacttcccagaaggaagcaggaagggtgtctcattatctgaggagtctggctgagatcacttatggcccagtcccttgcaaggtcgtctctgtcatcaggaggtttgtggtgcagtgtgactgtcacaggacggatctatagcagagcaaagaggaagagtattttccaagcatttgaattcactccccaaagaaccctgaatggattcacatcctctacagacttacataaatactgagtaatgttttagtaccttggactaacacagattggggtctggaatatcattgattagtacaagttgagtctccacttatccaaaatgcttgggaaggggtgggaagtatgaagagaagttaataaattagtacaaacatatggtgtgatacaagacataagactcagtattaaatagatcattagggtgactagagtttataataatgtattgcatatttcaaaatagctagaagagaagaattagaatggttctagcataaagaagtaacaaatgtttaagatgatagataacctaagtacactgatttgacctttacaagtacatgaatgtattaaattatcacatgtaccttgaaactatgtacatctattatgcattgttataaaaaaattttttaaatgcttgggattcgaaatgtttagtattttggaatattttcggtattcttagttgagcatccctaattcaaaaattcaaaattcaaaatgttccattcaacatttccttcgagcatcatgttggcactcaagaagtttcagatttttgagcattttggaatttgggttttcacattagggatattcaacttgtatctggtatcatctgcagagggaagtaggacagcatagcaattaacaactttatagggttgttgggagattaaactataaaatacatgtaaaacatccagtccagtggtgctaagtaggtgcttagtaaagtgtggttatcattgttgattgttgtggttttaagtattatcacatgatgacataatatcagaagctttctaaagatttaacagcacctccccactccaggaaaggtagaagctccagaccactgaaatgcagaaggagccccaggtagcaagccctggactcacctggtgtaccagggactgccctaagtcctggggacacaaagtgagcaggaaggatggggaagcacatggaaatgaataaatgctgtaacttcagaaagaagctctctgaagccactaaaagaaagttccatgatagtgcctgaaagcggggggtgacaggcaacattcagtagactagtagacttgtttgacatggcatttgatgacatgatgccaagactctgttcaagaaatagaatcaagaccactgtgatgaagagtgtaaaggcagagtggggatgggagcggaggttataggaaagcagattggaaaggcaaacagaggggactatggtaaggattttgaatttttcctgagtgcagtggaaagcctttaagcaggggtgacatgatgtgactgccatcataagtgatggcgggctgccctgctggtcagagaccggcttggggtgggggctgagggtgaccagtggcagcagggaaatgtggaaagcttctatagagatccaggtgagagatgagggtggtttgaatgagggtaagggcagtggatcaagtaggtctaacacaaatcctatcatgatttcagctagcaacagcacactggcttttctgtgatctttggagtgaagatttttaaaccacaggtaatcagaatcataccaacttgccctccagcaacctcgttgccctatccagcttccaagctcgccacacacaccatttcatttaataaatctgctaaggctttcagaaaccagttcaatatcaatctctctctccctttgtcctctctctctttttctctctcttatgcacactgtctcactctcactccctaaaattgtacaattttggccacattttttcttctatatgacattgctgcaggagtttgaacatttcttttttttccctaaatagaccatagaaggaacattactttaacttagtcctgcagaaaataagtgaaatggtatcattgagaatgtagaatagagttgtctgttatacacaaaattttgaaactgctgatatattttgtgacttgtaaggcctaggtgtgggtaattaacctcctggagagtgtttaattgccgagataaccttatgctcctcttaaactcatattaaccttctggctctatttcatatctgtccttcccaataaaataaaattgactcttcttgaaaggacccatttagaagctgacctggcaggtacactgctgaatagataaccaggaggacattaatgatttcttggtagtttgctatccccatggtagaaagcactttagttgtatactgctgacactccatctatacattggtttaagatatttagcttgatggtgtatgggctgcaagggtttttcagtctgtagagcatttgcctaaaatctgttactataaaaggagggttgtcattatcagaatccaaagacttgctaaagcaacaaaagcagcaaagaactgtaggcaaattcacaagtacagcttatacttcttcagtgaattctaagtgttaactcttgcctggtttggaagtctgttatgtgaaaatattggcctgatcttctcttcctaccataaaatgcaaaaatgtagaatttttagctcatttgttcaaagtcgtataccttccttgatacccagttatgattatagtggagatagaagactaattccagcatacagatgccaagagttgataatggacacgtaaatgaaacagtgaattaacgttttagttttttggttgtgactttagctctgattacttcattatcagagaaggcagctgtgaaacaggaaataaatgcactaactctgtcttattatataatcacttgtatggattgtgtttttttgttgttttgggtgggtgtttttggttttctttccttgttttttacctatgagatgtttaagctccctgtgggcatgcaacttgatttatcaagacagtgaattaaggtagtgtgggaaagctcagatgttaaattcaggtgtgcctgtgattgtattttggtactgttcacagagcttagatgggctattgaacctctctggatcccctttctctcatctgtgaagtggggataacaattcctaccatagggttggtataaagagtagattaaatgacaggtgaagcatgctcaggacgctgtctgttagacagtacatgttccatgaatggtagccatggtcagcatggaatgtcttagtcatctctgtatacaagcatctgtttggcactcaggaaacaagggacgcttaataagtgtgtgaatgaatgcttacattaagagacgttatttcactcctcaatgagaccttgaaggggagagaattaacatgcaagacagagcatggatgtagagacaggaagaaggcatgctcggcttcttttcgtctgcatgagcgttgccacgttaaattaactttgatcctccttttcttcatctggaaaatggggttaataaacttgcctcacagataaactgcatggaaggcctggcacacagagatgctggtaacctattgcttgccctttccctcttttccatctacttcctcctccccttgtcctccacaaacacactgccagttccctttcttttcctggactggctccagcagtttgaaaagcttatagcacttcgattattcttgaaagatacatctacttaaataatcctatagtcctggcttaattatgtgtgaatctttatcttgcttgctgaagagtattatttgcctcccttttgatcttgaaatgcttctgtgttcagggctggatggttctgataaaagtctcccaaagagaacacagagagtgttttttatttgcaaatcaaaaaaaaattaaaaagaagatgacaaggcccagtaaccagtgtaaagacagtggatgagcaattatgtcatatgtatgcatagaatttggaacagcccagagaatgtggttaaatgtaatagtgaagtcagtatgaataacagattacagaggaatagactagatccataggaatgtatattatttagtatctgtcttttttaacaaactcatccattgtcctctgtaacatacaactcatgtgaataatttttcttcctgtctgaagttctcatccctttttatagttttattttctgagggaaaaaaatattgttctttattaagtttttataacattttctcttgccttaggatgcaaattgatttctttgctgagagcacacccttaacagcttcttcctttggtaaagcatctgctaagcatctgcttttaaaatgatgataatttctggtagagaagaactgcaggctcatttcaacccattaaacagtccacagtttcataatttaacttcaagaaaaatggaagtttctcttcttaggcatctctttctgccaccttcagagaactctacaggaagtatccatgggccctcaaaaaatggcatgtctgtgcataaaaatagcagcatggagcaggcatcagcgtcagaaggagagttgatgacaccttctgtgctccagagctcccaggaggcaccacacacaattaatgccctgtgacacagctgctgacctctttccactcattccttccattctctcatttgttcacattcttattcttattgtatcaacctcgatagttaatagatatgcactctttctgtttttacttcctttcataaaagctttatcgaatgactgttcaaggcctggcattgggccaagtactaaggttttcttcttagaattagtgtggttttcccactggacattttttcctttgactttcacagtaaggtctcctagagtactaaactgcagatcaagtagggagctactttcattagctgctgtcttggcatcaagaaactgttattaattcgtatattcctaactgtgctctcacgttatatagatacagaaactgagacctagaaaagaggagagtgatccaaggtcatacaactacttcatggcagtacccaggataggtctttctctctttatggaacaaatatggctaccaatatccatcagcttattgaaatgtggcaaattgaatcatcttttctcgctctcattttgtaataatggattgacccaggtgtcaagttaacccagcctcaaggatcagtctctatgcatctgaagagcaggttttctctcatactctggttgtccatccaccaccccctcagctaatcctcagagcccgatactctggcctgccccatccacccagctctggacaaggctcactctgctgctgggctgtgccctgagctccaagaccaagcccatctgagaggatgctgtgtccacatggtgggtaccagcttggactcagcagaggagtaactgcaaagcacgtattatgggctgaattgtgcaccacctcccaccaccaaaatccatgtgttaaaatcctaacctccagtaactcagaatgtgactggatttggaaagaagagtctttaaagaggtcattaaatgaaaatgaggtcactgggaagagccctaatccaatatggctgactaatgtccttataagaagaggaaatttggacacagatatgtacagagggaaggccatttgaagagagagggaaaagacagctgtctgtacaagccaaggagagaggtgttgtaagaaaccaagccctgtcattaccttctcagattcctagcctccagaactgtgaaaaaacaaatttctgtcatttcaggcactttagtctatgttcctcggttatgcagccctagcagaccagtaagcagccagatttcatcaactggcctgtccctgcccctcctcacaccaccacctcacaaggctacacaaatgcatcagactttattagggactgcagcaactacaatacagtagaaaaacctctgtctaaatttgagggttcccgtgcttcatgctccatattccaagggagaattatcctccaagttaaaactctccacagaaggccctcttgtggcatacatgggttcctaactccttccctgccttcaagtttctagcttcctgagtgcctccttcctccattcttctcagtgagtgttgccagcgtacctttctcagaaatcccagtgttttacccacaagaatgcttcttgcccaggaacaaacccctcctaagcagattttttaaaattcatgtcattcttaaataatccccccaaaaggttttagtaggctagttagggatggccattgacattccaagtctagctaaacaaggagtggtgatggtggtggtgtgatgatggtggtgatggtggtggtgtgatggtggtggtgatgatggtagtgtgatggtgttggtgatggtgttggtggtggtggtggtgatggtggtggtggtgatggtggtagtggtggtggtggtgatggtggtggtgtgatggtggtgtgatggtggtggtggtgtgatagtggtgtgatggtggtggtgatggtggtggtgtgatagtggtgttggtggtggtgtgatggtgtgatggtggtggtgtgatggtggtggtggtggtgatggtggtggtgtgatgtggtggtgtgatgtggtggtggtggtgtgatggtggtgtgtgatggtggttggtggtgtgatggtggtgtgatggtgtagtgatcgtggtggtgtgatggtggtgtgatcgtggtggtggtggtggtggtgtgatggtgtgatggtggtgggtgatggtgctgtgatggtgtgatggtggtggtgatggtggtggtgtgatggtgttggtgttggtggtggtgtgatggtggtggtgatggtggtggtgtgatggtggtagtgatggtggtggtgtgatggtggtggtggtggtgtgatggtggtggtgatggtggtggtttgatggtggtggtgtgatggtggtgattgtggtgtggtggttgtgatggtgatggtagtggcagtgatggtgatggtggtggtggtggtggaggagatgacagttgtgactatagtggtggcagtggtgatgatggagatgagggtggtagtgacgactgtgatggtggagatggtgttaatggtggtggtggtagtaatggtggcatgcttatgagatgggagtgaggtttactattcctaattttacagaactgtccaggttagtatgggcccttaagaataatcctttctgagatcttcccaccagtataaattgcagatgtaccacttaaatttccctattatctgaagagtaaatattgaatctgatgcagaaaaacaaacctttcagagcaaatattaattctcagagctagtacattcaaaacagagattacaagatgccatgggtctgggtaggtcagtaattcagagaagcagcatgtgtgggagcggtggggatgtggacggggaggaacagtggattctacctgccccttctcctaaaaaggcactgccagcagcaggtgtggaagcaggtaggcccagtatcagcaggaagtcttaatttgtttcccaaaaaaaaaatcacatttacattccacatctctctatattacatgttgacaactccatcattttttttaaaacactgtcagccaacgaacccctgttttgcaacagttgatagaaaggaagacttcttacttgcctcataatttgtaatcctctcagaatgaagtaagtaattcacatattttgtgggatgtaattagtttcttatcttcccttcacctcatgtctttaaaaatgtacccatcttttaaaatgtgcatataaaaataaataagaaatgagcctatggctgagtcttaagagactctgttgacattggaaattaccacatatgaagacttggttgggatctcagctgaacattgtccgcacaggcatttctatctgagccaaggaacggaagggtgctgtggatctttggggtacctcaagttgtgtgagcatgtcatctggcagtagctcttcactttttaactttgcttttctgtgctcctggttgacctactcattaataagctgcaggcaaacacttatatatattgggagagttgtctggaataagtctttgattccataaatagccacctctaatttacctgtttgtgaaaggttgtgtttattttgtttctccttaaacctgaacactaattagtagagcagcggtagatgaaaccagttcacttggatctagggaggtccttccacccagtggctccgcctggcaatggaaatgagccagttttgactgctctgctcacccatggtgcacaggcagataattgctttgggcaggtcacagcttgttgagctgtgcacacaggccttagggagctgagactctgctttgttttcacttgtggatgggaacgtggtgctatgttgctgcttccttttagtcttctgagccaagcagctgtaatagcctcaacctctggctgagttctgggggttggtgggagggagcctattaccctgaagggttggtattgcacaactggcttctaccttcttggagaagaggttaggagtttcctgcatggctctgaacaatcatgagaactcctgactgtgaatcccccatcctaggagcccagactggcttcttccccgtagtgcaatgatggtaaattgactctctgccctttacttccatagctccttttccttctttcctttgtgttgctttcctagtttattttatgacacacactctctgagctacagaatgatctgtccagtctaattttatcgaggccttcagaaaccactgaagctcatgcctaatgtcagatgtgtttgacccagttgaggacttcatatctgtctgtgggaaaatttaaaatgtaatgacagcaagtttaaaatatggaattcaactcaagtgcttctattaataatcaggaaaaactactttggcatgcttcctgcctgcagcagacagctttgttcaaatgagctgttgtttcaagacctttcaagtgccttgcttttgtggcaaattgggagctaccaacctcatctattttgtggcaatactggtttactgaaataccaagagagttgtcagcgtaaggatgtagaacattgtcatgaaaataagtcaggagagccctgcacgtcagagccaaggaaaatagtttagaatcttggaacaataccagccttcaaaatggggaaaacctataataagtttggttgtttaatttttgggagtgtagaactgtaaggatgttacacaattattcaatcaaacagtgaaaaaaatctcttataagacactgtcctaattgtgatcatccctttacatttatatcaaactaatatattataaatgtagatagagatggttaatgcacaagatatggagacagacatagtaactcactagctgtgtgacctacagccaaattacttaatctaaacctccgtctctttacctataaaattgggacaataataatacctttataagatttggtgaggatatttacactgcacatgcattgcacatgttaagtgtttaatatgttagctattataattagaagctttaaaattttccctgtgattcctgaagcagtcatcttgtgacaaaattcagaacacttaaggccttgtattatgcattgtatttatagcttggttcatagttgttgaatatacttatgatactttaataagatagcatctatgaatgagcctacagaagttcctggcacatggtatgcactcaaaaatatattaatttttttggcccttttctgaagaaaatcccaaaagcttagagatttatcagcttccgctggccaccatccacttaaataagctgtaaacatgtaagttgcaatagcttattctcctaagacaggctaatgagtcaaccgtgggtctggcatggctatgatgaaggtcattagatctctactattggatccacagtctttccctctggctttctaaaccagtatccaataggtagaccgaggcacccaagctccaataatagagcagtagcatttccaagcatccaggagctccataaattagtcttacgactaggatgggacaaataactaatttcccccggccagccatgttcaggcctgtccagccttatcactaacccctaagctttctcccggaatcataacccctttaaggtcttaaattgtgtttatttgttaatgcagtcaatgtgtttaacatttagacatctaatgggaatttttttatgtttcattcaaatgtcaaaacctcaatcgtgtagaaatacgaaactggatgtgactgtttaggagatgttcgatggaggtagcccacagcatggttaatattcagcagcagatatcatcatttgaaaatcattgccctgggtagtttcaaactccgcctctcctttaggctattcttagcttcattagcaagctgcaagatgagctccactgagatttctaatcctctgtcttcctggccctacctttagtgaaggtcacccgtaggaggaagggtcagattactccgctttgtaccccagcacctaaaacaatgccagggatgtaataggcacttgatgaatgttggctgagtggaagtttagggctccaggtaatccacaacccaggtaatccatgctttgcaggatatagtgatatgtactgtccagagatccacaaaatatacactaagcacacagaggaggcacctaggtgggaagtttgaggagcccttggggtgccagctgatatgcagaacagggaagggctttctcccaccgcatcccagtctgtactgaggtggcttgccaaccccagctcctgtttggagcctaaaagcagttcctaaatcacattacctccgatcatccttgggagatcataaatacataattcagaagaaagatcttagatttttcatgatgtacccattataattcctggcatgccactctagagttttaaagatgctgataagtcttgaaattagatgtagggctaagctccaggctaacgtataccttgctgttatgtaattgaaataaaatctacttttaggtgactactttcaaataaaatagaaaaatgtcaatattttaaaaaatgcataagtactcattagtagccctcttaagaagcttcacaaagacaaagcactttaaactaagcaaccagtactacaaagtagactgagcgatccagtgttctgactttccccatattgagagaggcttaatttgttcttgctttgtttttgaattgaaggctatgaaagcaaattttgatcccataggataccaaatgactgagattttctcttcatggtatatggcattcttcttgtcactgcaaataactttggcaaagtctcaactttgcatgtcccatctttgccctccaaggcctaagaacctcttctcattaggtgagaaagtcagaaaggctgcagtcaaatttaaagcaatattacagccttgttggcagggagacataaccgcagcagacagactcttgaggtatgcaggaattagagatgcgcttgtttggtatcagccagaacagaatgggattttttatttagcattttttacaacagaaggtgttgttctgtctctatcagcagtagccagggcatgcttgcttcatctctgaatgaagaattacaaatatctctgcgcaaggccgtgacagacccatgatgtgtgctttgatacatgcacaaaaccatttacccgtcttcaaaaatgatgcttccagaagcaattcatttaaaagttcctgtcatgccacaagggcatcaacatgtaaggaagagtgaactcagtttctcatggtgtaaagcaagtacacacctaggtgaaagggagaaaaagcctattccaaaactcctcttttagaaattacatagtgcctatggtaggatttttaaaaatacaattatttccgattatagaaatatgagaatcatgtaactatgatcatatatgatacatgttcattgtaagaaaatttaacaaaaacagagaagacaaagataaatgaataaaaacatttaataatattcatagtttttccataaattgatgattgtgttttaaattttggtaaataatctttcagaactttcttttacatttatgtatatatgtatacacatatatttcatataatcctacataaaatttgtgaagaaatctaataaatactttatatagtttcatatccttgcttatttgttatggacatttttctatattaatatatttacattcaatatgttacttttttccattgcatgggatctcattaaatagcaatctagggtagagttgccaatgaccttaagtaggaaccatctatcactttttctagaatattgcatgaatatagcccagccccccaggaggccctagtgatacttctgtagtgttggtttggtgcccagtttcaagccatttactagccttcacttctgcctgtggatcagctaaaggaaagactctggacatcatctaatgtaatttggcagattatttccaatacttgatcagcttgcacgcaaatatgaacaaaaatctatcccttggctggatctgtaatactctaccttatagcatttacctactgaaggaaaaattatacagtgtaagaaatgtttatgtaaatatctttgaaacatttggaaaagagtactgcatattaattcatgtcctttgaaaaattatatcaagaacctaaacatgtaacctaaatatgtaactttagacatctaaacaggttacccacaaatatcagctactctcctttcttccagtatagtttgatattctaccttacaacattttgtcattgaagacaaaatgatatattgtaagcaccttttcacaaaagtacaaataaatcccacagaatcataaaatttcagagctaaatagtaccttagaaatcatctgcttgatgatggattatttaaatcccaaactaaagatctggataaacatttgccaaatgtgggcatgcaagcgacattcgcatttggcatagctgtctgcattctctactggtgacaaattgtagtgtaaaaagagggaaaggatccaaaccaaactgtagctgaggcttgacatgtctctgagagggcacatatgccttctcatgtttaaaagcaaaatcccttcagatgatgcaggtagaataaggagaaagaagagcagcccctgtctcccgccacacatcccccatcagttccaacttggagctattaagaaaaagggactctggaaagactcttacgtgcatgccaagaataagtcatctctgcactcagagaaaccccactttcagacaaccttgaaatgtggttttcacggagggagggcatgaaaaataatatgcttctataaaacatccctttttgagagtaaaaatgtaaagaaatatataattcatgaatatgagtctgttgtgaaaccatagattacaaggtccttaatgactgtttttgttttcttcctggtactgactttgtacttattagactctaagtaaatattagctgaattaaaatgaaaaaaaatatattcttaccttctcttttcattgtgtttagacagaggaaatagaaaactaatctcacctcaactttacaattagttcttacctgagaggagctttagctatctaggcttttgcccagatatttccaaaggcataaatgtgtaactataaatgcctaacaaatgacaagggcagttccgaaactgtagcagaaaacaccatctataaggttgccagttggtaacacaaatatttctgaaccacctacagtttaacttaattatgttttccacagtagggttacttgctcctggaaggacagaatgcatgaggctgaagttgcttaataaatggtgttatctggagatgtgtacatttccaaagcccagccccagcttgcaagcttgaaatcagcactctgaccaatacataaaagacactgcacactgcttaccacctcacacaggtgttcaggcttaaagtctgacataagagattaagaaggcaagttggtgaaaaatacagcttctggaagctataagtagacccagagatggacccagggatcttagaaatcatacgtgaaactttgagaaggaagttgcccttgactaccacaactgaggtttggagtaagagttcaaaactgcaaagaatgataagcaaagggaaaagcattgttctcactgcttttctgttctctccttgattgtcatgcatttcaatggcatccagatgttctattattttagctaccaacttgggaaattacattgtagttactttcaaagttgtcagaacactaaactcaacaatgacagtttataacccattttctctaaagtgctcaattttttttcttaaccctgatgggctggcatttaaataaagtaagccaggattctgaaactcaattagtttctggatatgcaaagttattctttgtgctcatccacatgcatattggttcttacatcttgggtaccctgtactttaattttttctctatttgtatctagatttgtttaaaaataggaaattcacttcatgctttaactttcaatagttttcagtctttaaaactaaactatttaaattcttttggctttcaaatttgcatttttcagaaaattgaaggctagttaaaaagaccaatattattaaatttgaaaatgcgtattttcccagttgaatcaaaaacataatagtatgtatatcatattttacaactgatttctttaagatttcccagaaaactcagttcataattttctgttgcaaagggatgaagttctcttcagtttaatgcctgcagcattcttatggtaattttgaaattgggagacttggtcacattcataaatggtaactgtagaaaactgactaccttcaaatcaaataaaagcataaagaaccttgaggatacttttgaaaagaggagactctctaacaagtctagttacagcgtctattcctagggcagatgaatgagagagttcttataagactactgctgtggtttctttttctttattttttttatagactgtttgtattatctgtctgtacagtacttagcaccctgttgaactcaataaatatgcagtggtgataatattgctccgaattcacttagcactttcacatcttttgagtgtcacaatgttctgcctactaggtgcagggaattttaatttaatgctcattctgaggcttaaagcttggaagtgcaatgacccatgtaagataatcctccactccagtagcacatttttggagcaaagccattaggttgtacaagaattcattaaaaagcagaaaaactgtacttcccacactaaaacactgatgaggctcagtacactgttgtttctaatctctaccctggaagccatccacatcatattcccccaaagcacaaaaaaggaaaaaaaaaatttgaaaactatgatgattaaacagttctgaccaacctcaatcaaactttgatccatggcagaaattaggaaagaaatcaaaaggtcctggaacaagttcttcatcagaacaatacagtttgtccctcaacctaattcagctattactagattgtggaatacctagcagtttccacgtattttctcctatgaagttgcatttttctcttggctttttagaaactatctacaggtagttttaataccaataaaatcaatggtatctttagcactaacacagtttctagcatctaataagcaccctggaactatttagttgaatgaatgaatgaatgaatgagtgaatgatccatgaagggaaataccaaattgttctgaaaaccctggtctcggttattttattgcttcattaaaaagaaaagactgttggggttacctgacagaatctttaactttttaaaacattccagtagtttatggggtatgggttgttttttgttacatggatttgggacttatgaggacaactagcctcctccaaaaaaaaaaagactaaaagttatcataaatgtaataaatgttctgggaatattaaaattaaattggccgggtgcgttggctcacacctgtaatcccagcactttgggaggccgaggtaggcggatcatgaggtcaggagatcgagaccatcctggctaacacggtgaaagcccgtctccactaaaaaaaaaaaaaaaaaatagctgggtgtggtggcaggagcctgtagtcccagctactcaggaggctgaggcaggagaatggtgtgaacccgggaggcagagcttgcagtgaaccaagatcgcaccactgcactgcagcctgggtgacagtgcaagactctgtctcaaaaaaataaaaaaataaataaaaataaaaaattaattaattaatgttaaattgatataaattatcactcatgagaatacacagatatttggtgtgagatttaattgacagtccacaattgataattaaccataaacacactcatgtatgtgcatgcacacacacatacacacacacgtacttccagcatataaaacataattatacccaaagttaccctaacacagttgaggataccagaataacacaggtgaagtacttatgaactgtaggacagcacatgataaaattttatacccaactttgagaaacaacttgtatgtgctataaagttaatggctgcacttatcagggaggacttcacagaagaggggagacttgacctgggccttggataagaagaagatcaacgtaaaagaagagaacactgatgattcaagcagaagatataaagagggatgcatatggcacccttgggagactatgacaggagtagcctacctgccagtggaagtaggaattggagagcagtagaggagggaaattgaagtagtttcgactagatacttgatgaaatacagaaccataaaaggtttttgagcaggatggtggcatgatcaacgtcatatacaaagacagtttatctgggaaaagaggactttggagttagaaggagtctgggatcagaccagctggttaagaggaggcagatcgaggtgtgaggggattgctatccaactgcaggtagtggtagcagtaagataaaagatacctggataaatgggcaaaactcagtgattgaataggaaggagtgaaggaaggaacaaggatagttcttcctcatggatgtcagaagctggtgttcagtagcaggcatgtatagacatcataagtttggttggcttcatttgtgtttcttccctttaaatgaagtgaggtggtcatcctgctagcaactgactgcctaattagctctttctcattcgccatcagtatatgagctgaggactgatctactcttgacttgtgctttgagtttccagtgcagaaaaaaaaaaggcttccataagagttttctggaaaaaaatatacaaaaattatctttttacttttacagaaaatttgcatatatcttagttttactcatttccataaggttcttaactctgcctgttgaagtaatcactatggcaactgcagtgtttctggcacaggtgagttggacttagggtccatatattttaattttctttttacttgcatgtgtacttggggttgacatgaaggattaggcaattcactcaccagggtcactttgatgaatacatcatcccagcctaattgctatgatgtagaaatggaatctaaagagagattcatttgggaaaaggagggaggtttccctttatgattgtagtagagatttaatgttgttacagtgaataacaactgatagaacatttgcatagctggaagaaacccattgttgcaggatgatgttaagccatattggtggaaagaggctgggtgtaggttcaggcagaccaaggtttgaatcaagattctgccatatatttgctgaatgatctagagcaaattcttactctgtgatagtctcagtatcctcaattgtaaaatgaagataataacaaccaccttatcgggttgttttatgtgttgtgtagaaagcatgtgtggagagactaacagaatgtcttgcgtacagtaatatatcaactgtatcaactgttagtttccttcttcacgtcaaaaaatcctccatgtttctttgtccccagtacctagcacagtttcaacatattcaataactattttgctcaatagatgcaaatgcagaagggcattttgaggactaggaaaagtagcaatatcccttgttaaatagacatgtttgctttccaatgggggtcctaattcagcgcttcagctaaagggcatatatacaattgtgggtgtgtgcattgtacttccaaagatgagcagttgtatcctctcacagctctgtcaggaagctcatcatgactcaccctcctacagatcaggtggttaattatgttattaaactgtcagaattatccagaatggctttgtcatccacctgacaagagacctcagtttgataccactgtgttcaaatggctgaaaaatgtgaatgtgttgtgagataatgtatgaacatatatggaagatttttttcaaaatgttttatgcaagatttttttcctttaattcctgtgctttagctattacattgttcttaacttaaaattgattttagttcacttctacagctatctttcagagcctaagatatgcaggttctgtggtcaatgtgatggggacaaagatgagtaagatttggctcattgggaccacaaccctcacttcttaaaaaagaagagaagaccttcatcagaataaaaatcaccagccatgatctttattatgatatttttactcatcgtgaaatgagtaaactggatggtagcaagctagattcagctaaatagtcatggtggattgcaaaaaatggccacaaattcttgcaactctttctttcaagagctggaggctatttccatgcccccttgggtctgggctggcttggtgacttgctgtgaccagtagcttatagtagaagtgatgccgaactttcagaagctcagccccaagagacctggcttctcttcttattgtgcctataatcctgagacattgaccagttttcatgatgtggtcactccctagtggcaagatagacccttcaactaaactttggttggaaagtcaagaccatgatgccacacacacaccaaaagtatatgtaaaggtttattacttgcatatgagctttctggggagaacagggtgggcttccaaactggtccacaaatggcttctgaaagtaggaaatggagatgagcttggggttatatggtgggtgggggtaggactaggtgagggttcctgcgctcaagctggggtccacgtggtttgaccttccagctagcaccaaaggaggaagtacctggggtttcttaatgtgcccacatgtggagcagacagggacaggattgtgatgggacagaaggctgtcagcagtcaaaatgaaaaatggcatcaatcttgttattactctttcttactagtgtcttcctagtatatagcatctgaaattattatttaaaaatatttattctttatttctctaccctctccatcctctacagtaagctcagtaatgactgaaaccaagcatacattgttctcctccaaatctctggcttctagattagtgtttggtacatagaaagtgatcagtaaatatatatgaatgaatttctacaagtgaacattagttttgctgtatccagtcctgatgcttacagtctcattacagaatgaatgcactctaagtctaatgatcttgagtttttaatcctaataatcttaaattttaatgacctgctctgcatctcctaacagttgatacctctaaagaaacgggtaagaaatgttagcctttggttcttctctatgctttgagctatgtccttgtatcaagtcccatcaccagaacaccatgtacctggattaggtttctccagctttccatggaaatatttttacagtattaggttcctgatatttattgaagctatagtacacagccatatacacctatctctgaatattttataaaggtactgctcagcacatggctatctattttagtcactgtttcctaggacagacccatgcagcaggcatctcagagtttagagctgggccagttagcatttcctcctctattagatgaggagttcagccaacttatagaaggaaactgttgtgttaaactgtaggaggttcccttaccctagattttctcacattattatctaccagttcttgtctttttatctttcttttaattttatatgtatagtcgtctctcaatatccgtggaggattggttccaagaaccccctcagataccaaaatcaatgtatactcaagtcccttacataaaatgatgtagtatttgcatataaactatgaactatgaaacctgtattctttaagtcatctgtagattactgataatacctaatacagtgtaaataccatgtaaatagtttttatactatattacttaggaaacaaagacaagaaaaaacagtctgtacatacatgttcagtacagatgtttttttcttctccaaatattttttatccaagtttggttgaatccaggacacagaacccatggatacaggagaaccaactctgtgtgtgtgtgtgtgtgtgtgtgtgtgtgtgtgtgtgtgtgtgtgtgtgtataattttctgtaaatctccacaaactttctttgtaagtagatatggtattaataattaataaatggatgcttgcacactggaaaatattcaagtaagactgttccgttgcccttcccctgtttggggaaacctggtgtttgggaaaaagcaaggagtaatgctgtctggttgctccagcagaagtggcgtgttctttacctttatgtctcctgtagcacgtttaaagggatcaagaaatgtttgtcacattaaacttcctggatttttttctataccacaggggcaggggcttgattaacgtcatttatgaccggaactcataggatatagggatctagaatttgaaatacatctgctttccagagatatcctgaaggatctttttaaagtagagtaagaggttgattttcatctatattttctccttaacatagtgcctaaccctgaggctttaagcactgctgtggaataattaccaattgatcttcacgagcactttaatatctttgaatctctgggattgattctcttcttttacctaaagcttgatacagtaaaaatgaaacaataagtcattgctaataccattgctttagtctataatttaaaatgctttaaaaatataattaggttaaccttttctcagggaatagatggatacacataaagagagctacatagttcgtttctataaaatgaatctgttttcctgccatttttgccatacagttggagatgtgctttcattgaaaaacatgtcttaacatagtgaactgtttagcatttggtgaaggacttttgacagtattccacattggacgaaagtgtggtgaaaagtgttttctaacacttttagaaatgtgccacgtaccctcaactgttttcatttatctttctcctcatccttatttccagatttcatgctgcagtttctgtaatttaactcttcttcatcttttctaatagcaatttgaagtgtagccatctaaatttgcttgttttcatttttaaaaatgacttattattaaactatacctgtgcttcaaattcaaaatatggtaaataaggtcccttaatgtaaatgatatttgaactcagtgttttttatccctttaggatttttgtgtgatagtccaggattccaaatgttatagcattcatttcttttgtttttcaacttttatttaagttcagtggtacatgtgcaggatgttacataggtaaacatgtgccatggtggtttattgcacacatcatcccatcacccaggtattaagcccagcagccatcagatattcttcttgatgttctccctcccccaatccctacaacaggtgcccagtgtgtattgtcccccaataccatgtgtccaatagcatgtttgtttagcaacaatgtacactgcctgtgttgcaatatggcaaatcaggataatgcaagaaataggttattataaaattaaatgaaaggttaaagggccttattagctattagtaatagaaaaaatgaagtgaaaatctgtgtcctctgaggatattgaaaatattctaaaatttgattatcatggtgtgagtgcccaactctgtaaatatataaaaacaatttaattgtacacattaaacaggtgaactttatggtatataaattgtatctcagtaaagctaatttttttaaacagctctgtcctggtgaaggaatgaaataatggattaatttacatacacttacataaacaataatgatcctaataaatcctcagttgaaacaaattgcaattgcaatattaaaggcgcaaacctcaactgcctaaggaatttttctaaaagtcaaatcttgtctgtggctgtgggtgcatcttatgagatacaaatgttgtatccttgatgctcatgccaattgtattaagtccattttcatgctgctgataaagacataactgagactgggcaatttacaaaagaaagagatttactggactcacagttccatgtggcaggagagacctcacaatcatggcagaagatgaaaggcatatcttatgtgccagcagacaagagaagtgagcttgtgcagggaaactcctctttttaaaacaatcagatcccatgaaacttattcactattatgagaacagcacaggaaaaacccacctccatgatttaagtacctcccactggatccctcacacaacacgtgggaattcaatatgagatttgggtggggacagggccaaaccatatcattctcccctggcccctcccaaatctcacatttcaaaaccaattatgacttctcaacagtcccccaaagtcaactcatttcagcattaactcaaaagtccacagtccaaggtctcatctgaaacaaagcaagtcccttccacctatgagcctgtaaaatcaaaaacaaattagttactttctagatataatggcagtatacccattgggtaaatacagccattccaaatgggagaaattggccaaaacaaaggggttacaggccccctgcaagtccagaatccagtggaacagtcaaatcttaaagctccaaaatgatctcctttgactccatgtctcatatccaggtcatgctgatacaaggggtgggctcccatggccctgggcagctctgcctctgtggctttgcagggtacagcctccctccaagctgcttttatgggctggcattgagtatctgcagcttttccagacacacagtgcaagctgtcagtggatctaccattctggggcctggagaacagtggccctcttctcacagctccactaggtggtaccccagtagggactgtgtggtggctctgacctcacatttccctttcacactgccctagcagaggttctccatgagagccccacccctgcagcaaacttctgcctggacacccaggcatttctctatatcttctgaaatctaggtggatgttcccaaacctcaataatttacttctgtgcactcacaggctcaataccacatggaagctgctaaggcttggggcttgcaccctctgaagccatggcctgagctctatgttggcccctttcagccatggctagggtggctaggatgcaagacaccaagtccctaggctgcacacagcatggggaccctgggcctggcctacgaaaacatcttttcctcctagttctctgggcctgtgatgggggagggactgccttgaagacctctgacatgccctggtgatattttccccattaccttggggattaacattcagctccttgttgcttgtgcaaatttctgcagacggcttgaatttctcctcagaaaatgggattttcttttctattgcattgtcaagctgcaaattttccaaacttttatgctgtttcccttataaaactgaatgcctttaacagcatccaagtcacctcttgaacgttttgctgcttagtaatttcttccaccagataccctaaatcatctctctcaagttcaaagttccacatatctttagggcaggggcaaaattccaccagactctttgctaaaacataacaagagtcacctttgctccagttgccaacaagttcctcatctccatctcagaccacttcagcctggatttcattgtccatattattattagcatttttgtcaaagccattaaacaagtctctaggaagttccaaactttcccatattttcctgtcttcttctgagacctccaaattgttccaacctctgcctgttagccagttccaaattcacttccacattttcaggtatcttttcagcagggcttcactctcggtaccaatttactgtattagtctgttttcacactgttaataaaaacatactcaagactgggcaatttacaaaagaaagaggtttattggacttacagtttcacgtggctggggaggcctatctatcatggcagaaggtgaaaggcacatcttatgtggtggcagacaagagaagggagcttgtgcagggaaactcccctttttaaaaccatcagatcccatgagacttactcactatcacgagaacagcacgggaaagaccagcccacatgattcaagtacctcccaccaggtccctcccacaacacgtgggaattcaagatgagatttgggtggggatgcagccaaaccatatcaccaatcatcaggtatttattgagttccattgtgatagaggctgctcttggagagtcaaaggtataaaatacaaaaccagctgtattacttgctattgctgtttaacaaaacatagtggcttaaaacaacaccattttatttagctcacagtgttgtgggtgggttgttggtgggttgtgttgttcttgtctgagctggctcagctgatctctgctgggatttttcaagaaactgtggtgaactggtgagagggctaactggtgatctaggatagacccactcacatgtctggcagttggcaggctatcttctgaggcacttggttgtcctccatgtggcccctcatcctttaggttggccacatagtactttcaggtttccaagtacagcaagagcagcaactataaaacctcttgaggttcaggatctggacttgcaccatgtcacttagactgtattttactggtcaaagcaagttactaagccatcccagattcagaggatagggaaataaaattcacctattgataggaggagctgcaagatttgatggatatttttagagtcaatttcatagtcaatcaattactaaaataaggctgctttctagacctccatccaagtcacttcaacactacagcaatgtagctaaatctggttttgtgctatccagtttatcccttccgtttaagtaaactaagtctcattatgaagatgatttgggtatgttaagtacacactcacagtattcatgtgtattaaatgttgaattaattacccccactagaagtgggcagggataacagcagctcttgctaaaactgtttaaattttgcttcaaactgttgccatagatttacctaacataaagattgttttgatttcctaaagtacacaccattaaatgggtccaaagccagaggagcaggagaccacaagatgggaataaaattacagtggcgtggttacttcacattgagtaattaagaagcaactatattataatatctattttaattctggccatttgccagctataacttctctcacagcaataagaaaagttgaggagcaaaccaaaatattcacctgaatacaatgagaaacacacaagacaagaatggaaaaaaaaaccctaaatccaattgactaatgttagagaagaaatttataaaattcaacgtatctggtaagctacctaccaaaaggaaaatcaggagcaggtagtgagaaatcacccaatatagtctcacaaccttgttaaaactgtgagatcattatcccattgccagttgttcccaagaaatgggcctcttcttaaatatgggggactgaatgctgagggccagccagggaaaacactcccagctccactgacatctgacatgaatcacatcagaacctaagacctttgcccacagccattaaaaattgtgacagttcaactgtgaaaatcttcaggttcaagcttgggtctcagacagaaaaatccatctcccaactacctcatcaaagtgtagtgttcagcttgacttttcctatccctaggcatccgctttctataaacacagctcccagcatgatggtgtcaattaaatacccactttcaattacctaatagaagaaaaaaaagaaaaaaagatcttgttacttaggaagttttttttttaaccaattctatggatgtagaagtctagcatcttaaaagacaccttaaatgaccatttgctttctataagctgttgcctcagatacagttgagatttataaaagtcctaggcaagcttcttagaagcatactaacatcagctgataaagagtgtttctattttcctttgaattagacatccctttctctgctataatcctctttatatagagactccttttctattgagccaagagtggaataattgcaaaagccttgtcagggtgccatactggagagactttccatgtctccattatccctctacaagtagacagtttatttttttttagtttttaaaaatttatcatttaaaagcatgtttaatcagttactcaaataatgctgctttctaagtcacttcatcaaatttactaaggaaaaaataattatttaaggtgatggatatctcaatgacactgatttggtcttcacaaataatataagtatattaaattaggacatgtcccctgaaaacatgtacatcaattatataccaataaaacatacaaaattaaaaaactttaataaaagatcaactataagatggaattgtttaatagctatgacaatttctagaaagttctactgcagagttttccttttctatatttatagaagcatttcaaggaataatcaacttcttaaaaactatggatataagtggtttaattgttttattatatgtttaatattcagaaaagcatatttatagtcaacagttgcaatttcaagtatcctatatattcatcaaaaatatgaatttgctgagaaaagacacagaacaaccataacaatgggaactggtgaaattgtggttacgatgttttagaaatacaaattttaagctgatatactctttgaatggttagtaaaagaatgataaaatgcctaaaattcaaaatattttaaatgacattcagaagatggaaagatactcagatgcttgaaatgaccccttcacacgtgacatgataaaatttaacatgttgccagaagcaccaaattgtggctaagtcactctggttgttaaagaatggttaaactaaaaaataatagaaagtgaccttaaaaacagctaaagaaatctgaaatggccaaaatcatcctatgtcagctaatttgttattatctagtatctgggacatgtattaagtgagatttgtcaactcagtagcagtgggctgacagattcaacatgaaaagcaaaaactgtccaaaacaatggaaaggaaataagcaatggaaaggaaataagagaacaggacactatcacatttaccttacagttaaatctattcaatagaagtccacatctccctaggattcttaaatctcaataaaatgaacatttactaaaatactgctcttatgacaaaatgaaaaaattgtcatctaaagcttccctaaaatattcaaaagcttttaaaaccactcaatctactatgaatttcgattaacttcataaacagctacaagaaaacaatgttttggtaaatttagcacattgatttttggcaagttggcttctggcaaactggtcgttttatatattgtttatttcagcatattgatttttagcaatttggcttctttctgatacctggtgccctcagagaacaagctggataatcaaagacttatttttagaaatatatcaagtgccaagagtcactagttaggagactgagtatacatggtgattgagacagacattgccaccgacttcatgggagatacagcctgtcagggaagacagacattaagtaaaagtgacataaataattatttagctagaattttaataatgcttaaaaaaaaacatggtatgaaatgagagtgtctgagaggaagacctggtagataaccttttatttttaattgatttgtaattaaaaattatataatagaaaatgcagtctggcctggtgaaacagacaggaggaccagtgctgagcatcatcatcagtcaggtgtgggtggcgtggtaggtttgcagaaccgacatagaccatgggcagcacgcactgcctaaggagcagtgactggcatccattaatgtctccagtgttcatcttgtgcagggtcctttatgttttcctcacatgccttagagtggtctttgtctttaaagtgacaggctccactttccatgtgcttctctctcacggcttacctgcaggctccagtcttctctcagcctgcagcttgcaacccccgttgccatttgccatgccgccactgaggctggcctccccagatccttttccttggctgctttttatttttattcttacacttctttgttgctggctgttcttctcagggttctccgggctttgagagagcatgctggccagtggtggcactcctgtgcctctgcacaagtgtactgaacaactgggtctctgacacctcccagggagtggttttacatagctctggtggtctagagcttctcatcccaaataccatcttcattagaaatctaaggattctcggaggctatttctgaaatcatcaatgttttaccttaactaataccagaaaacgagttgtccatattattaagaggagttctaaatagttagaatttgttttctgttttttgtttgtttgtttgtttaactagtccttgtggagcagggctaccccacaggcagtgtgcctttgtttaaaaaagataaatgaaagacgggaggaaactatgtatgccctgtgattaagatgtatctaaacaatatgtaaatagctgtgttaaaaaagcagtcaatagcactaagagacaaaaatgtttttgcttgcagtgtttacaaagaagtttagacttcagcagaactggactgctggaataaaagacacagtccaggttttggtggggttttttgtttgtttttttaaaaatcggcatatttgttttctggggctgctataaaacaaattaccacaagcttgttggcttaaaacaacaagaatttattctctcagagttttagaggctggaagttcaacgtcaatttcaggaagatcaatgtcaatttcactcacctgaaatgaaggtgtcagcagggccaggcaccctctggaggttctggggaagaatccttccttgcttcttggagcttcaagtagctggcagcatccctgacttgtggccacatccctctaatctctgtttcttcctcttccgagtgtaacctcatctgcctgtgtctcctttacaaggacattagtgatgtcatctatggcccaccaggttaatccaggatgatctcctcatctcaagatccttaacttaatcgcatttgcaaagacccctttttcaaattagctgacatttacaggttctagagattaggatttgatatatttggtttcatcattcaactcactacacaggggttacattgtttctgttgagaatcacaattcacagaaaggggcccaagtctttgcttatcctgaaggtagggtgatttgttctatgtgtttctttccagatataaagttgttttttcccgactctgctactggtgcacttgatcatcctggtagaggacaaggtgccagcgctgctttctcagttgtgtgcttgcaaacaaactgactgacaaacgcagagcactcgataaatgtcattgttattattggtgtggctacatgcaggaaaacagcctgaaattttattattttttcacatcagatgggtaataagatttgagggagacacatctctcacgtgtgggaaaacccagtcatcacacttatgaactgcaaatggaccccagactgaattttttttttttttttttgagatggagtctcgctctgtcacccaggctggagtgcagtggcgtgatctcggctcactgcaccctctgcctcccgggttcaagcaattctcctgcctcagcctcccaagtagctgggattacaggagcgtgcccccgtgcctggctaattttttgtattttagtagagactgggtttcaccatgttggccaggatggtctcgatctcctgacctcgtgatccacccacctcggcctcccaaagtgctgggattataggcgtgagccactgcacctggcccccagactgaaattttaaaaaagaaaacactaacatgataatggtagttagtgaatggaaggatcagggggtcatactgctttaaaaaattacgttgaaatttaatttaaaaaaaacatttttaaacattcatttaatctgaatactcttgagactacaagactactctaaaatttacttagtaaattctatgctcagaatctatgagagtctagtggttatctctgggtaatgggatcatgagtgattttttaaaaatattttactttcctgttttcataattttgctacataaaacatacataacatatataaaaattgattaaaattaatgtatttgggccaggtagatcatgtgtgtaatcccagcattttgggaggccgaggtgggagaatcacttgaggcctagagaccagccttggcaacatactgagacccccatctctacaaaaacctttaataattggccagtcatggtggctcatgcctgtagtcctagctactcagaaggctgatgagggaggatcgcttgagcccaggagttcaaggctgcagtgagccatgatcacaccactgtacttcagtctgagagacagagtgagatcgtgtctcaaaaagaaaaattaatatatcaaaattttgatatataaactctgagctttagagtttgcaattagttttatgtacattatcacatttacagctccatgaggtttgacattatttggctatttggaaggtgaggacgtgagctgtacagggatccaatccaaggctgatgtagcaaggaaaggaacaggaccatagtcctttttatcttgactccaagtctagtggtttatacagaatttaagttactgtgaagttaatgatactccttataaaatgtatgtttgcctgcttttgaatttgcgctagaagaaaattttgctcatccaaccccagtctccatgtgggattcctagaagttttcaaacctgtttattaatgtatttttaacatgtgtcaaaattctgcttagttccacaatcaatcattatttcttgtaatttctgaaaaatgcccatttatgtcttgagactattccattcaaatctcaaaaaagactatttttaatcatgtagtttttaaaatttttttttcatccccctgcctttatcataggtcttcttatgcctaagaactaaagcaatttctttaaaatgagcagagcaggttctttccatgatagctgacccttcattatgaaatcgggggctaagtcaaattcggttttgtgttgtcttccctatcacccaccccttcacccaccaacttgcatttattgaagcaaaatgtttcacaatatttgtggtgctattagaatgtccttcagtccaacaccctttatcctcctcctaaagctcagcattttgctattgaatatgtagatgtatgtaaggaagttcattgatgttttgctttccagttactctcaaacctgtaaatatttttgaagccttgaatagatcatttgttcattattggtgccagttttacctccaggggacatttagaaatgcctggagacagtttttggttgtcacaatagcagagagcaggtacctagtcagtagggaaaaggatggtgccagccatcctacaggacagcccccacaacaaaattatatgaccccaaatgttcaatactgcccttgttgagaaatatggacctagatcaacaccacccatctttcaattccatcttatagatgttcacctcccccagaataccacagagatacagactttacaaaacatgcacttaaacaaggagtggcagcatcattcagctgatccaggttccacccttactttttcttggtgacctatgcatagcaaatggctttcatatcatctaaagtctaggataatgatagtgtcttactctctggtggctgaaggatttctgtgaggccttaggttcattctcttgggaaaaaaaaaagcccttaaggcagtaagaagaccccccaagggcacagttagctatgccttcgtctgtatcctctctttatatctctaacacaaaagtttgtttgtttgcttggtttttcttttttaataatttaagggaggtgctttagtctcctcagtaaattatattgtgtcataatgctagtacctaacataatgacaacacataaaaattgcttaatcaatgtttgttgaatgaatgactttaattgttcagagtttcatgttcagttatagatcatgaattccaattgcctatagtctcctgtcaccttcttcagatttactctgtattctaacttctgttttactttttccactggttttatttttgcccttgggggatatttttttattcattaaatttactaatttactcacatcaatttactaattgtttcttacgctaggtactgttagcattgtcagaaatgtttaaggggtgaggaagcaaagatgagtaaagacaatgtacaatttaattataatacagagagtgactgaatgctattagaatctatttatagaaagatcaaaataaaatttgagacatagaggaaaagcttatagaagcgatataacaatcaatgctcctggaagtgggatgaggtttgaacaggcatttttttcatccactactcactcactcacctactcattaatcctgtaagcatattttgagtgcctgctctgtggctaaggacacaaaaatgaataagatattgcttataccctcaatgcatttatggtttaatatttgaaaaaattaatgataaacctcttcacagcaagccatcatctgacagtagagaatcagagaaaaacattgcttctagatcagatgggtttgccatgagaatcctggtttctccattgtttctgagctatacaaccttgggcaaatttaaattatgtctcaatgtccatatttgttacatgggaatagcaatatctacctcacagagattttactagaattaaaagaaataacatgttaattattcaataaacatttatagagaacccattactttccagatactaggttaagcactagaggttaagcactggggatacaaaaacaaatgaccctccacctgtcttccaagggacagtttgataagtgctttgggagacatcacagagcaggtgtgcttcacttggacggtggaaaggtgataaaggaccacttccctgtgggataaccactgagtttgatgttaaaaaacactggaagttagacccaggaaaaaacttcaccgcacaggatgttccagaagtaagaacagcaggcttgctgaggggcaggtagctgactggagcctagagaggagggaagatgtggagtaggggagacaggggcagtggttacacaagggtagcaaagactgaggcacaaggctggatgtcagaaggctacgtatgccttgttagacagtgtggatccaactgggagccactctggaagaaacaggctcagtaaccacttaatacatgagtaaaacaagtctacattctggaaggtttgggggaagactcaagtgaactgggcacattctgatgttactagctgaagccttgtacatgaaagtttaggaaatcaatttgaataggtaatatgaggcaagactgtgatagaatttggtgtcttggtggtctcttgtctacaaaatgattgattgttttagcaccatgtgtacaatgtcctagatgaggaaaagacttgaggcttgaataccagatatgagattgtgacttagttatcaaattatagggtccaggtctagggtagagcaatcgaagcatacatgcagagttggacagcagtcttctgagaagcatcatcagtatgagacagagagggtagagcccacagctctataagcttaagtaaatgaaagcatggtggtccctaggttgaaaggccgatgtgacttgagagagaagatatgagttgagtttggcacgttatgttttagatgcaaggggggcaaaaaagtgaaacttcctattgagaccttagatatatgggatgaaatcttgtgcaggaaactgaagctgtaggtacagatttgggaatcctcacaatagagatgattgtttaggggtatataaatacttcttgatattctttatttccatttttgaaaggttttctaatattaattaggagctttagtctgatattcaattaacagagcagtgcttttaagtacactttcctttgctgcaaagcatctgtttaatatgtgctactacctaatatgccaggaagctctggttccccaataactctgttatgataaattggcacctttggaagttataggaagttttccagcctccaaagtcctctctgagtatctgatgttttaattcagaggagtacattactggtttaattgtggtaagaattcttaataaccaaaccctgagtatggaggtctacctgcttcttctggaaaaaggattgtctctggaagggagagagaagcaagctgtggttcagtttatgtcacctgtgtcagtgcgataccacatgtttgagaacctaatgtgtatccagcactggcttagacactaaggatacagcaagttctttttgttccaagtccagcaaacaagcacaagatgtgtagagaagggattacatagatgtctgttccaaaggctgttaagcactagaagaagcagaggctgaccttgtccagggcagtaggattttttaaaatcgcagtataatggcatgttaactgaacgctaaagtctaagtaacatttactctggaagttaaatgagataatgtcggttggttatcataataataatgcactagaaaataaagtcaattaatttgttttaaaaaagcaatgctcttatttgcttggaacactataagtactcaaaaatgaagaaaaagaaaagtagacatttgccaggtagtcagggagaaaaaggaacaatgtatatattccagagagaaggaacaaggtgtgtgtaacaaaaccagacagacaggaagagtaggcacagcgtgtatgtttgttgggagagcatactgaaaatattggtaaacaaattatcatatttgctttacaaaatgatccctgagcctgcaaaaaggagcatggcttgtggatagaggaagatcggataaaaggagaccagtcaggaggctatagaccaggtctagataagaatgaatggggatctgaactaaggtaggggatggagaagagaggatagattttagatagttctaggtggtagaattaatagaacttggtggctaattaaatgtgataataaacaggcaaagaggattctagaacacctccctgcaggaactcccggtaaagtttgagcatgtcatgtctgacttagggcatgcatatctgaaaccacctgtgctgaatgacaagcctgatttttccagcaccaatgctcttcttgattgtttgcttgacactttgggaagtagcattaacactctcaggtcactagggggctaatcatagccattttcatgattgcaattctgaattggagttttcagagaataatcatggcagttcacataagggtctttcctggaagaggctctcactgtctttggacaatgtcatttgcattaagaccattccatgaggctagtgtcataaaaatcattacttatatagcttttgctctcaaatctttagtcattccagaggtctactgaatactaaattatttgttcattccagctgtaaatgtgttaagctgatggacacaaactattcacaagtgaatgactagaaggatggatggatgagcatagatagatagatagatagatagatagatagatagatagatagaaattaatgacagcagttagtgctctatttgcatgaacatgttaacaattttaaagaaaaattaatttacaatgatttagtaaaaccataaacctgcgtttaaaacctatattggctaaacgtaaaacactgtgttggactattacatactagattcagcctttagaagacataggtggagggttatttatgtttgtatatccagtgcttaacctctagtgcttaacctagtatctgaaagtaatgggttctctatatatgtttgttgaataattaacatgttatttcatttaattctagtaacatctctgtgaggtagatattgctattcccatgtaacaaatatggatattgagacataatttatatttgctcaaggttgtacagctcagaagcagtggaaaaaccagcattcttatggcaaacctgtctgatccagaagcaatgtttttctcttactctctactgttgtgaagatggctctttgaaggcactgtctgatccttcttgagcttctgcacagttcctagttgggagctgagttactctttcagatcatagagaagtctcattcttggcaaccaaactgttgtgctgacccagacattttatatctggagctgccatttgagagtcgccagcagagggttcaagttcaggtaagccacagcctaccagttttgggaaatgataaggataatgacattcctgaccccagccttccaagatgctcaccaagcccaaatgtgcacctgttcagagcaagccataattcctcacctcagaccacgaaccatgttcaggtaatcatgaagatgattcccattgattcagtaggacccaattacactgcaaaagagtgaaattgagtagaagaatggcatttggggacagaattgttaagtaacgaaaaagaagtaatggcaattgacccttgaggtgtctgatcagacccacacaagactgctaggaaaataaattagttgtaagggatctataccttctctgtgaaccccaggccattagcattgtcctttcaatttctccagaaagttctcaggcttcatttagctactgatactgtagaaatttcatttttaggaagaaagtcataaatatagcaacacctatactcttttgaaaaggaaagattcctagtatctgggcaataaagtgagaatttgattcatttatttaaaagatctctcaggtacaaattcagtcacttctagggtggtcttttatttttttccttttatgtctgtaaaaagagatatgatcctcccactcctgcccatctcactgatgtctttagaaagctggaaccagagtctgattacagacatttgttgccatgaagacacaacggaacgtggttaagggagaagaaagagccttaactatgaattattttcctgtgatggctaattttttttctcttatacctttccaaaaaggtggcaaggtgacatctatttagaatgtatttaattgcaactttcagaagactgaaacagtaatatctcacagaatcctcagtcacaattcaaaatgtttggaaaagcagaagatgaagtgtactctcagcagaggggaaagaaattgaaatttcaagtaatctgcctagtctgctgattacactgtgtgacggaggatataccagcccttgatttttgtctctgatttccattcatctgaggtcctttccttatgatcagggactctgtgggtagccatggtacttaaaatctaaggaatagcaaagagaattttcttctattataaagtggtggtgtcagatgaagtaattggatcctaatccctatttacagcaattcaaagacagattaaaaacctcacccaaagcatcttcctaaaccacagtcaaatggtgtgtgtatatatacatcactgtgtacgtgtgtgtgtgtgtgtctgtgtgtgtgagagagagagagaggaatgtttattcataaagaaacacacaataaagtcatgaggattataaaaattgatgacatagtcattagataagaatcaaccttgtttaatttttacatagaattactaaaaataagcagtcagaattttccatgtatttcagttagatttttttttaattcagtggaattaattactgtaatttgggaagaacgaactttgttttagttcagaaaatgtattactcacataatggatcccaggagccatacagtgtcaagaattgttcaattgtgtaacagtgttatcaagaaacctcattcctcctccctgccatccttggaatcaggcctcacagaatctgccccctgattgcttcaaaaaagataccagaaacaaatacagctaccgatttttcattgttctcattgagacagggcatcagagtggtagggagaattggggcaaataaactttcctataaacctttacttcttacatttcaaaaggttgtgtaaaacctgtgatcttttcttctatagcatttcatgagaattaaaggtcttaaggttaagcaggacattgaggaatcctctaggaagccctctgaaataatacaaatacatcatcactccagatagattttaaacatcccattttatgaggaagaattccgtaatcaccttatgagaagagaactcaataatatagatttttactgcagggacatttaattccccaaaagtaaagggcatttatttaaaacaccaggttccccaagatactagagtaacatttaaaatggtaccaaaacattgatgatcccactgggaatttttagcctgactacttttgcacacagcctacatacagagctttgtctcgcttccgcatccctttgtgatttgtaatcatggctgtcatctcctccagatgggaagctcctgtggcgcaaggaccatgtttttgttcatcatcatctctctcccacagtgcttttacattgcaggtcctcaaggagtaattactgaacacataatacatagtacagatcaggaatagtgaattcaaagtactctgatataaacaatacgattctttgatgaagacatgctacttccccatttatgcaacaaatatgtttagttaatttttcctggaaaagtatgtacatttttttgtgttatccacctggatttcacaacatgctgagtcttgtatggctatgctgtcacctataagctgagtgactctgggcaaagcattggatcttgctggattcttcatccattatcaagtggggttaatatttcttcaccaactttcctagtcaagtcgttgggaaaatcaaatgtgttcacagatattaaagtgcttggaagtagtatgaatgaaggggcctcaatattattgttgctactgaagactcagaacatgatgagtccctgtcacactatagctttcaataataaattaccctggcagctgacccacaaactcaaaagcaccaagatagagcactgagacttgggccaacctagggatcctaagtctgtctaaggcaaagctacataaaaggacagatggatctcaccctaagcctttcctggattgcagtgatatgtcttaggactctgattatctgatttcaaaaccaaagggaccagaacttggacaacagccatacatctttgccaagtagccttcagctgctggtgatgcaatgacctgatacctcatgcaatctttttgttttttgtaatttctggagatttccagggaagactgtgagcctgcatgttatggtaatggtcctatccactgaagcatgcaaacagataactctttatgatcaatagacattcctattgccttaaagcctattcaagtatcatttttattgtaagctttctgatggaatttttaatgtagcaaaattctaatcagtttggaagtttcataaactgattcctcttactgttatatgacaagacttcgcagaacattctctacatattttggtgaattatttcttcctagtttggctggatattagaatccctgacatactcttttcacaaagccagaaggaaaagaaagatgcttattcacaaagttacatgtttaagcatagaatgagatttttcaggacagttggagcaaataaccttccgtgagtgtgcactgtggtgttaaactctctacatgcttggcaatctctgctgcctgtcacatactctgaaacatggtttgggaatatttctcccaaaatgcttttgccataaaatagaaacagctttggctccccactaaataaagctcttatgaagagacattcattattcattgctcacttttctccagttctgtccaccagaaatctcaggacctttcacacataggtacttgtgggcctgatcttctgagaacgttctgggagaaagtacaactatctgggcaatgtcatgccctgcttcactaaatgagcagtgagaatatatccattaagcacgagtatgactccggcctgaattaatttagcttctagtagggagttaactttgatcatgataataacactctgagagtaatgtccaagattgtaaatcatcatctgtaaaaactacttgtattctactttcactcagcaaaacaactgagtacttattggaagtctttcttttgaaatgccttttcaatgtttttggctgggcaaaaagactatttctagaatttacagatacacaactgagttacacatttttaattgactccagaggcagtgtgactctcctttatctttcattatttaacacatttaatctgtttggcttttgacatccgcagaaagttcaccagccactgttttcacattacttagacttcatgataggggctgcctgaggcggaatgactagaacattcttccttagctgtctgcctcccctgttgaaaagtaaaagtgaagaatcattggagtctttaaatggaacttaagcagatgaatgttaactgggagtggagtggaagttttaggctttaaaaaaaattcttttaggagagtattattcattctcttaaattattggatttctgaatccatgtgatttcatggtcaaaagataattgctttttccccttatctcagggaaagaggatttttaaaatcatgtaagtacttaaaaagcatttcaaattttcaagaatttataatgaaagagatattagaacactcatgtgattttatttaaacactctttactacagtagtaacatttccagacttttcatttgattggtcagttttatattttatatttgtgattggtttcattttctggatacattgagttatttctctgccaatatttttcatgtctgagtttttctgtctttggcaatttacctcttccatacatttcctttacttatcctgccctaggcaccaggaatagaaaaatgaaagacacaacgtctgccctcagagaactcagaaagatatatatatatttttttgagacagagtctcactctgtcacccaggctggagtgcagtggcacatatcatagctcactgcagcctgcactttttgtgctcaagcaatccttccaccttagcctccccagtaactgggaccaaaggtgcacaccaccacatccggttaattttttaattttcgtggagacaaagtctcaccatgttccccgagctgatcttgaactcctgggttcaggcaatcctcccaccaccacctcacaaattgctggtgttgaactaccacataggcatgaactaccacacctggccatatacatacttttggaagagacagacaaagtggttataatacaggtgcataagtgatttgatggaaatgagcataaattctgaaggaacacagaagaggaacttcatttagacctgggactaaacatgtgtgtctcacattctcctggaaagcaagaactggtgactataaatctatgtataataaatgtgctgaatatacatacatgaaaaatacttcctaaatattagttattaatgacagtagtcaccttgaatttatctgtttgaacctatttaagtctacggagttgatctttatttaaaatttacatgtactccctttcgtcttgtggaagtaattaaaatactttatccaagatgaaccatctttctgttttagtagctgtatcctgagacccatttccccagggacttgaattttattatgtgtaaagaaaaaatactacctgttgtgtgttgagtacaagagtacacagggtttttaatagctctgttaataggataatgaataatgtttgtttccaaccaacaggatatctacctaatttattaacaatcaaagatccaactcaaaattaaaatagcatgctattagaagtaggaaaacaaaacagaataatttcttcaccaatgcaaggccttgttcctgatgcctcttatgaaaaccaaaaggaactgatattagctcggcatccgttatgtgtcaggacatgtgctggatgctgccagtacaatggatgatatggcattgtcttatccctcagagagcttacaagctaactgaatgcaggggtgtgaaagaagacagatatgcaacaattagatatggaattggggacgtgttagcatctgaacaaagtcaagtgaaacatacaaaggagtcattctatctgaatgtggtctctgagaaggcatcataaagggacaaacagtacagcaggccttagaggattttataagaactacaggagtagggagtaagggggataccatgcagtgggaaccccaatcaaagcagcaagggccttggaagtatattctccatgttggaagaacaaatggactgtgaattccctgaaggaaagaagcccatattgctttaccactgtttacctagtgctgtggtttggatgtgtccgccaaagtttatgtgttggaaacaatccccaatgcaaccatgtcggaggtagaacctacaagaggtgattaggttagagggctgtgccttcgtggatggattgaagctcttatctcaggagtgggttctggataaaaaggataagctatgccttcttcctctcttgcttttgtccttccaccttccaccatggaatgatgcagcaagaagatcctggccacatgatggcaccttgatgttggacttcccaggctccagaactgtgagccaaataaacttctattgtttatccatttcccagtctcagatattctgttatagcaacacaaatcagactaagacacccagtgtctaaaacactgcacattggaggcactgtaaatttatgttgaattaagtgatctgattgtgtgattaaaactgtaggtgtagcggtgttagacactggaggctaagaatagcacagtggatagatggtgtcaatactacaggatcttgtatgttaatactgaagagtatgcacttaatccagtaattaagcacttcttaaagtatgttccttgaaatatcagacctacagccctcagaattctgccatcaaatatgtttcggaaacactggtttaaatggttaagcagtttcttttgcttagactcccttggtctttactccaatcatgtacattgtaaagctccaagaggggtttataatattcttcaaacttctaggatcctggcccctcttttaaggggagcaccttgtggccttggtgttctccatgacaccatttatgaaatctgctgtaagcaataaggagccagtaaagacctttcagcaggagattgacatgcttggaatttcagtcttctagagaatggcattgggtgaggcaatattggagtcagggagacaaagttgaagagagatgcaatggtttaggcaggagataatgagagcttgacaccaagggtagagaagggaccaagaaatataactgacatttaagaagtagcactttagggacattgttatattgtatagcttgtgccctatgcagggacacctggccaaatgggccccagggcactgaatccagcccacattcactgttgccaagctgtgcatccaggcagagggccgcatgtgtcctaaggaggacagcttgctatggtttgaatatttgcttccttcaaaactcatgttgaagtttaatccccaatgtggcagtattggatgacgaggccttgaagaaatgattggatcatgagggctctgctatgaatggatttattgggttaatagattaatgggttatcataacaggggaactgggggctttgtaagaggaagagagacctgagctagcaagttagtacatacagcccccttcctatgtgatgatgccctgcaccacctcacaactctccagagtcccaccaggaagaaggctcctaccagatgcatccctcaaccttggacttctcagcctctataactgtaagaagcgagtttcctttctttataaaatgcccaggttcaggtattatgttgtaagcaatagaaagcgactgagagactgccagtatataattcacagccagctatgtccctagtcaatgactgatgagatgttgggaggaacaaggaattgtctaagatgactcatatttctgttctaaactatgatatggataaagatgatttaatttcttattctaatttcttttgattcttctaaaactatactatctgaaatcataatacctagagaaggaatgatgaatgtgcacctctgctgctctgaatgttctcttccaagagttacagttttatctttaccacgcattaaagtgtacatactgtcattgcagagagattgttatcaagacctcaaaccaagggttacaaactcaaatgcccacagaacccatcaaacataataaatgggtgatatatgtagcagaccatttacatattaaatgtttttcatttacaataagaaatatactctcttcatttgtctaaacatgcagtgttccccatttatattttataaccatttttttataggaacatgagtagtgagaagtacttttctattctaagaaaatcttctgcacaaccgtgatgatgaatgataactgacattgctgtagtattagggacacagtagagactggtgggccagttttttttaatttttaggagaatctgggaatttgaatttttatatgaaatctctctcattttaaatattggcagaaatttttacaatacactgtatgggccaaaaaaaagaaagcatatttctgggccaccagttcatgatctctaccttagtctattttatacatacacataagcctaatttctgtaaattgatctatttaaaattcatatatttaggtaggcaaggtgttaaattacctgctaaatcgcccagaaatccctgttgaattgctgagaggagaaagcagtgtttgctcagctagtaattagagccgtgtccttatttttgcattaagcctttactgtggaaagaaaagccaaaaatctggtgcttggtggaagagttagtgcttaaatccaaataacatcatcagtggagctaaagcatgagaatctgccaagacaaaagtaacttaaagcatgaagtccagcactatgaaatagaagggaagctaccaatatatactttctgttgtaatttatatctggtggattctgtttcatggagaggggaatgtggaatagtatatcgactaaggccttgatgtcaggggagttgtgaactagtgcagagggatttagatctgcggctaatatgatgtcacatcttggttcatggcagaagtttcttaacggcccacatgtgagcacatagattggactcatctgtttgaaagggggagtgagcacatgggtggtagtcaccattgtactaaagaaactttgaggaggtgtttagttcctgctgatagggaagattagaatcaagcaagttttatgaatagaaaatgatgagcagatgagcctggaaggaaatggaaatgtgatgagattagtagctgatgcatacctctctgcagggaaaaaaaaaaaaaaaaagctttaagagatgtcaggatgggaaatactttatttcctaaagtgcaaagaaaagatttggacaaagctgtaatatcagcagctgctgccaaagtgaattggtcaaggatctttctgaaaaagctgccatttagcagttgttgggtttaaacacagggaagaaaagataccttcattgtcctgaaatgcaaggtccatgcatgcatgcattcaaccaacaaatatttgttgagaaccaactatgtgtagtcctgtggtaggccctggagtggctcacacacctgtaggaatcagtgccctgcagaagacagatcatgggtacctggaaagggtggattatgagctgactttctcctggtgcttcccaataatgcaatgtctttggacaaagagaaagctcaccaaaatgagtaacgtgattcactggccccaaggcctaggttcccttggttccatggatcagagcattttcagtttgagcattttcaaattgtattctttcctaaaagcacaactttttaggcaaaatgtaagttattaaaggcagttcagagaaaactctgtattagtctgttctcatgctgctaataaaggcgtaactgaagctcagtaatttataaaggaaagaggtttaattaagtcaagttccacatggctggggagaggtctcacaatcatggtggaaggcaaatgaggagcaaagccatgtcttacatggcagcaggctagaggcttgtgcaggggaactctcatttataaaaccatcagatcccatgaaacttattcactactgggagaacaatatatgagaaaccgcgcccatgattcatttatcgccacctggtcccaccgttgatatgtggggattattacaattcaaggtgagatttgggtggggatatggccaaatcatatcattccacttctgggccctcccaaatctcatgtcctcacatttcaaaaccagtcatgcatttctgaaagtcccccaaagtcttaattcatttcagaattaactcaaaagtccacagtccaaagtctcatctgagacaaggcaagtcccttcacctatgagcctgtaaaatcaaaagcaagttagctacttcccagatacaatgggggtacaggtattaggtaaatatacccattccaaatgggagaaattggccaaaacataggggctacaggccccatgcaagtccaaaatccaatagggtagtcattaaatcttaaagttccaaaatgatcttctttgactccatgtcccacatccaggtcatgctgatacaagaggtgggctcccatggccttgagtagctccactcctgtggctttgcagggtacagcctccctcctgactgctttcatggactgacattgtgtctgcagcttttccaggtgcacagtgcaagctgttggtggatctaccattctggggtttggaggacagtggccctcttctcacagttccactaggcagtgccccagtgggtagtctgtgtgggggctccaaccccacattttccttctgaactgccctagcagaggttctccatgagagccctgcccctgcagcaaacttctgcctggacatccaggcatttccatacatcctctgaaatctaggcagaagattccaaacctcagttcttgacttctgtgcacccacaggcccaacaccacatataagctgccaaagcttaaggcttgcaccctctgaagcaatggcctgagctgtatgttggccccttttagccatggctggcactgaagcggttgggatgcagggcaccatgtcctgaggctgcacagagcagggggaccctgggcccagcccacaaaaccattttttcctcctaggcctccaggaagcctgtgatggaaggggctgccttgaaggcctctgacatgcccttagaggcgttttcccattgtcttggtgattaacatttgggtcctcattacttgtgcaaatttctgcagctggcttgaatttcttcccaaaaactgggtttttcttttctatcgcattgttaggctgcaaaatttccaaacatttatgctctgcttcctctggaatgttttgctgcttagaaatttcttcttccagatgccctaaatcacctctttcaagtttaaagttccacagacatctagggcagggacaaaatgccaccagtctctttgcatagcaagagtgacttctactccagtttccaaaaagtccctcatctccatctgagacaacctcagcctggactttattgtccatatcgccatcagcattttggtcaaacccattcagcaagtctttaggaagttccaaactttcccacattgttctctcttcttctgagccctccaaactgttccaacctttgcctgttactgagttccaaagtcacttccacattttttggtatccttacagcagcatcccactacctggcatcaatttattgtattagtctgttttcatgctgctaatgaagacatactcaaggctgggtaatttataaaggaaagaggtttaattgactcacagttccatatggctggggcagtctcacaatcatggtggaaggtgaatgaggagtaaatccgtgtcttccatggcagcaggctagaggcttgtgcaggggaacttccatttataaaaccatcagatcccataagacttactcactaccaggagaacagtatggggaaaaccacccccatgattcagttacctccacctggccccacccttgacatgtggggattattacaattcaaggtgagatttgggtggggataaagccaaaccatatgactctttaattctgtttttctctttttctttcttccttaattctcttcctttctcctttcttctccttccttcctttctttcctttgaaccctcattctttcttttccttatttctgatattatttctgatgaaaactttcccttataaaccattccacaagtttattcaacatagtaagtatacatctcctgaaataattgatttactgagattggaaatagcagagacatgtgttgaagcatcacagaatgaggaaagcagagtggggagtgactggaacacctatccatctctggtttatttcttaataccaaatcataggtcaaataagagaaaccacatgtaatgacattaagggcagacagtttaatactgccttcttttgctttttctccgtgggtgatagcgcaagttaagtttagttcaatgacttcacctttcagaaagtttatcttcaagagttgctgttcctttgagatctaccctttaatttactgtttgtgtatacttttctttccagaaatggcaggaagcacttgtcttcccaggaatgcagtagtctgagaccatagacaaaaaggtctgaattccagcctcaacctttataacagctcctgagtattctttgagaaggtcatttctctatttctccacctgtaaagaggagataaagtttctttcaacctttttactatcttgaaaggtttaagtatttaaggtttgtgaaacattttgaagataaaaagtggagcgtaaacattacatctactttaaatgcagttcttctcttttttattatttttaagagctcagcattctggaaaacacctaaattaaaacttctgcaatatcgagttaacacacatacacaaataggcacacacacacacagatacacacacacacatacacacacacatagatgacaatttatgaatgcaagccttgtttgaggctcaaaagccagcttggaactaatctcttagaaagattgaggttatttctaataagatgatattaggctaagaagtacatctgtctggacctcagtttcctcatctgtaaaacaaatggattgaacgagaatgatacctaagctctcatttactcttgagttctcttaacatctagtgactctatgctttcctgagtataacagaagtaaggaaaggcagtttccctttatcctggggttctttgggacatatgagactatgacggaggtaggaaaatactcaacgatgggtaccttcgtacatttctctacctatgtggtgaccagtaagtagagacagccaagcacacataactggtgatttacagggtcttgtcaataaatagtgaaaatagataagcatctttactacaattaattttcaacagccacaacattaaattcctacccatagagactgtgctcctagggtccagtgacctctctaggcatattgttttaaatcaatcagatccaagagaagggtaacatattattagtaatttatcacagggcgtcctaacattttacccattaggatacatacagaaaatgataatatttgtataatatctttaggtaaagggaaaagctaatcccagccagagatgaccagcctatgtagatgagttcacattcgttcacctgagagctgagagggtcaatgtggcagcacattggaagccttcttgctgcgtgtggttggatattctgccttagtttaaaagacttcatctttagatttcttcccagcccagaacctgtcagcttggccctgagacttttgataatgagagggggagggagaaataaaactcttttgagctctgtcttctaccttagaagagtatcaagtgctaaaatagctcgcagcaatcaggagaatcagagtgaaggaaggtgcagagtactatggaagaagtcgggggatggtcaggatagggggaaggtatgcagtgttgactgacaaaattacaacaaatttagtttaaagattttagttggcttttatttgtgattctagaatctggcaacatattattccataaaatagaatgaatgttctgatgagctgagcagaggagcttggctttatagacagaaaatggctgaggaaagcagaaacaacagaaagcagatcagtcatttcgaagttacaaaggttaaagcaaagggactttcttattgttacagttaaacctgacctgtctggggatttggctgttctctctctctctctctctctctctcctgatttctctgaaggtcagataaacaacttaatactggcttggtagcatggaacgttagcatgcgtgactccattttggtttggtttggtttgttgatcctggtgcaggcattcagttcaagccaatggcctcttatacattttatttactaaaggcaaccccagtatgaatgtaaaaatacgtgctatttgggttgtttcacctagaacaagaagtacgcctagacagtggcagattgattggtagtgacagctgtctggaaagctccatctcggaagagtctgagaccacgttccacctttggaatgaacagtgaattgttcacgtttcctgtggcctccaggtgcagctggcaggatagagcagccaaagcccacatgctgtataattgccatccctgcacaggacatgctgaaactgtggtgctgaggccagggaaaggacatgtttgaactgtgttcagaggaaagaaaaggtggccatgcccatggggtggggcaagcatttagatgaaaggcagcataatgtgatggttaggagcacagaccccaaagcagattggatcctactatgcttcacccttctgtgccctgtttctaatctgtcgtgtggggataataatcgcatcttactccaagactgataaaaggatccatgagttaatatttgttaagcatttggaagagtgcctacatgtggttaacacggagtgcctgataaataagacgtagagagaaaccaagaccacccaggccctccctctcgtctccatgatcagggagaataatttttgtgcaaagaaaggtagaacaaattttgtgagagggagctgatgatgtaaccatgtaacaagatagtaagagaggatctaattgcacaaaataaggttctcaagtcttgagtgctgaaagaagttgcagccataccccacaacccagtggcagtttttaagcattgaggacagaaaggtgccaaaagactggagccagtcaaagatggtccctattatcaaaggaggaaaaggaggcttgattctagaagcacatcgaagtgctcaatgttgatccaaaggcacacgtgggaagggaattttgaacagatggttaacagatgcttctacatgggctgcgcagggtagggaaaagagcacgtgctgccacgccaaacagacttgggcgcaaacccgtgttctgtcactttccggctgaatggccttgagaatattcttaacgtctaagcctcaccgtctccagctgcagaatagaaatggcaatgcctacaggattcctgtgaaaaagtgacaatcgtaggtaaatgatcaagcagaggactgagcaaagcaggcgtgcaataagtgctatcagtataaccaaagaggcagcagcacataatgttttagaccaggagtcagcaaacttattctgttaagggcacttaacagactttgtgggccatacagtctcagcctcaactactcaaccatgcctttgtagcaggaaagcagccatagataatatgttattgcagcatggctgcattccaataaaactttatttaccaaaacaagcaaacagattttgcccttgggctatagtttgctgatccctggcttagaaccaaaactgccaggtttaaaacaaggctctgccacttgagaatagtgtgacctttgactatacaaggctctgccacttaagaatagtgtgacctttaaccagttcataattcagtttccttattggttaaattggtgtaaaaacagtatctatcttgtgagattgttgtaacaaaggagatcgtgcagggctctgcatctcacagtgagtacttgatgcatagcaagcttttaatgcatgttacctgttatcattatgattatcccaacagcctagggtagggagccaaagtttctagtaacatgaaatttagtagagacaaatataaaatcttgcacttatacctgcaaaaggaaaccacacacttacaggtgtgattatattatatattgctttttctaggaaaagacctaaatgctttaattcattgatatcacagtgctgtgtgacatggctgctacccaaaataagcatagtcatcgactgaagaaataggtgtgagattgtctctaggataacagaggggctttgcacagttctgagtaagtttaatatgcgatcgctctatcctggccatcgtattttaagaaggaagctggtatatgggaaaacatcttgaaagatgtaaacaatataataaataaggactcattatatataataaatcatctgagagataattatacaaattagtttttcaacctgggttgagatttctcaaatatatttaagtatttttataaggatggcagttttaaaacatagcctcccaaattatttgaccctcctcccatctagaggtggggtttatgtccccacctcctaaatctggactctgagactcttggtcagtagaatgtggtacaagtgatgctgtgccagtttttgagccaaggccttaagaaactgatggctgccactttccttcaggccagttgctcttagaacccagctgaggtcccagctaatagccatcatcaaccagcagatatgtcagatgactacaaccccagctacctatgacatcaattgcatgagaggctccaaataagaaccgcccccattcaacccccagaaccatgaaaaacaataaaaagattccagttattttaagtcacataattttctgttacacaacaataggttgctggggcaacgtggaagaggaatttgactttttctgtatagctacaacaagtaaaactagtctataggaagctccaagcactctaggatagtaagtacaggcagttagatttcggtttaatgttaagaaaagctttgtgtaaagtgttgggaggatatggaaaaaaggaatcccttgtacactgttttcccagtgtaaattaggacagccataatggaaaatagtatggaggttcctcaaaaactaaaaatggaactaccatatgaaccagcaatccaacctctgggtctacatgcaaaggaaataaaatcagtatattgaaaagaagtcttggataaagaaactgtggtgtgtgtgtgtgtgtgtgtgtgtgtatatatatatggtggaatactactcagccatgaaaatgaatgcatttgcagcaacctggatgagattgaagactattattctaagtaaagtaactcaggaatggaaaaccaaacattgtatattctcactgatatgtgggagctaagctatgaagatgcaaaggcatacaatgtatttggaggacttgggggaaggtggaggagggataaaatactacaaatatggtgcaatgtatactgctcaggtgaggggtgcaccaacatcccacaagtcaccactaaagaacttaatcatgtagccaaataccacctgtaccccaataacatatggaaatataatactaaaaaatatatttaaaaaataaagacaatattttcctatataaaaacaagaaaagaagtatgcatttccatgctcattgcagcactattcacaacacttgagatatggaaacaacgtaactgtccatcaacagatgcatgaagactatgtttgtatatatacacaatggaatactattcagcctttaaaaagaaggaaatcggccgggcgcgatggctcacgcctgtaataccagcagtttgggaggccgaggcgggcggatcacgaggtcaggagatcgagaccatcctggctaacacagtgaaaccccgtctgtactaaaaatacaaaaaaaaattagccaggcatggtggcgggtgcctgtagtcccagctactcgggaggctgaggcaggagaatggcgtgaacctgggaggtggagtttgcagtgagccaagatagcaccattgcactccagcctgggcgacagaggaagactctgcctcaaaaaaaaaaaaaaaaaaggagatagagaccatcctggccaacatggtgaaaacccgtctctactaaaaatacaaaaaaaaaaaaaaaaaattagctgggcgtggtggtgtgcacttgtaatcccagctactccggaagctgaggcaggagaatcatttgaatctgagagggggaggttgcagtgagtggagattgcgccaccgcattccagcctggcaacagagcgagacttgatctaaaaaataataataataataaagaaggaaatcctgtcatttgtgacaacatggaaacgtggatatacttgaagaacattatgttaactcaaatagaaagataaatgccacatgatctcacaaatatgtggaatgtaaaaaagtcaaatttataagagcagagaatagaatagtggttactagaggtgatagaggagacaggagggattggtaatggggagatgttgatcaaaggatacgaaatttcagttaggcaggaggcaagttgaagaggtctgttttacatcatggtgattatactaatggtaataacaatatattgtatactttaaaattgctaagagagtagtttttgtttgtttgtttgtttgtttttgaggtagaatctcactctgttgcccaggctggagtgcagtggtgtgatcttggctcactgcaaccactgcctcctgggttcaagtgattcttctgcctcagcctcccgagtatctgggattacaggcacgcaccaccatgcccagctaattttttgtatttttagtagagacagggtctcaccatgttggccagcctggtatcgaactcctgacctctggtgatccacctgccttcacctcccaaagtgctgggattacaggcatgaaccactacaccctgccagagagtagattttaagtcttctcaccacaaaaaaagttacatgaggtaatatatacgttaattaacctgttttagccattccgaggtgtatacatatatcaaaacgtcatgttgtatatcataagtatttgcaatttttatttgtcaactaaaaaaattaggtagagctttctgaaaattgaatctatcaaaccacaaatgggctgctaaacagggcactgagttcctcttaccaaatataccaaaattgaggccatgtgattgcaggtcccagatattacagaggatttaggtcatgggggattgtgaatttggtcagaatctgtgttcgtcggttggttatttggttgatctcccagtttgcctaaaaaagagtttgttacctaaaaggtactggataaatatttcatttattcattcaacaaatatttatggaattcttactacattctaggcactgttgtagatgctaggaatatgtctgaacaaaatagatgaaaattcattctctgtggagctcaggttctagtaaaagcagatatgtgataaccacgtaagtgaaatatataacatattaggtaacgataaagtgtcaaggaccaataaagtagttgccccttttccataggggatatgttccaagatccccagtggatgcctgaaactctgcagataataccaaaccctatatatgctatcgtttttcttgtacatacatacctatgacaaagcttaatttataaattaggcacagtaagagttcaatgacaatgatgatgtagaagagttataacaatatactgtcataaaagttatgtgattgatctctgtctcacaaaatagcttattgtgctgaaccacaggtaactgaagttgtggaaagtaaatccaaagataggagcagaccactgtataaaacaggggagggggatatgtaatatctgaagaatgattttccattataaatacaatagcctggaaataatcatttgtggtgaattaatggataaggaaaatgccagagtttaactcttcggcttaaaaatattgaatatattcttagacactcttgtaatcactgggaacaaggcagtagacaagatccaagatctccgcttttaggcagtttatatacttatcttctacttggggaaaggagacaacaaaaataaattcatcaggcaatttcagtgagtgagaagtgtgccctcccaccagcttccataacttcaaaattctcagtgtctgaccatttttggtcctacgaagctcttgtttcttccaggaatagacttaaagacatgtttcttgttgtaattgtcctgttttgtaattgtcctgcctcctggctctgcctggcattcacagaccaatgaactatttgtggctccattttttttttttttttttttttttttagacagaggtttgctcttgttgcccaggctggagtgcagtggcgcgatctcagctcactgcaacctccgcctcccgggttcaagcaattctcctgcctcagcctcctgagtagctggaattacaagcatgtgccaccatgcccagctaattttgcacttttagtagagacagggtttctccatgttggtcaggctggtctcgaactcccgacctcaggtgatccgcccacctcggcctcccaaagtgccaggattacaggcatgagccactgcacccggcctatttgtggctccttttattaggtgatagctgttatcatctaaagaaattaatctttcaggctttggattaattgccagcaccactgattattgattggcaataagagcagaaaatctaggtgaggatggttctctgttcttttgtgaggctgtagcagagcgagagtacacacgggtcacttctaaacaatggtgcgtttcttgcatccttaataagaaatgatgcagaagaggagatgatggggatttatctcagctagttttgctttgatcttcactgctgctactcctttcatatgggctaattcgaagggaggtttcaggcctaacgtattatgaagtctgaagtctgagaatctgatggaatgattgatgatgccattgatgattccattaatcattgttgattaatattccaggcacaaatgtggcagggcagatgaatgggtccagagaaataataatgaaaattcagactttgaggttagcagtgtagttcagttcagcaaacatttatccagaggacactaggtttcagaaaaggatgaaaaagacaaggttcctgcttttgagtagctcacagtgcactgaaggagacagacatgggaataaatcatttcaggagactggatgaatgtccacaaaagtgagcacagtttgaggagtggctaaaaatcattctgcattatcttcataatctttagattggtagtgttctcagttatgtaaactgggtatgaacctcagagtgcatggttaaaactgtccacctctagctgaccccccatgagtagaatcataacactagaagcacttgggagattatatgttaattttcatacagagaccctcagtgtctgaatgttcttttcacttattatcatagggaagagttgtaggtaagtgaattcttgatttcatagaatatttgtcacttagagctgtaccaggtgccagaacataacaatgaataagagacagttctcttgacctcaaattgctcacagtctagaaggattgaatggagatcaacaagcaaatagacacttaaaatgcaggatgataattagtgtcctagaactatacacatagtggcatagaaacatactaagggcacctacataggtctgcaggaggcagggaatggctttacaggaatgtttggattgaggcttctagaatgagtcaggtatattcccaggagagggcattccatgaagacaaatggctgtgcaaaggaatggagctataagagcatggcatgctcaggacctcccaagctcaccatgtaactgagcatagagatgagaaagaggcagacagtacaggctgatcaacaaagccagatgcagagagaatccagccagatctttgtcctcaaggagcccctgaagagtattacgcaaatcagcgacatgatcagatttttgaagaagaaatatcactctacaacaaaggcaaaggctgaaggcagggaggccaggaggctactgtggccatccaagcaagatgcaaggggggtctgtaatagggcagtgtgacagaagagttggcatggggtgaggggtgtgtgtgagatacctgttggtccccaagttcaattggatatagatagttagacagagggatgcctaggattctagtgtgcaccagtgtgtgagtagataggggtgccatttattaagacaatggacataggaaaaggaggaggtttgagggtattgatttcagtttgtgacttttggggtgctaggatccagaaagtagattactagtaaatagttgatcatgttggtttggtgatcaggaaataggcttaggcacaagagatacacattggagaattagcagcatgtaggtagtagatgaaaccatgggtaaggagatggaggagtaattggcaaaaaggcaggaaaagcagattggagctatgttgttaaggcccttgaaccatctcagaaggttttgcaaggtgagactgatttggctaaagagactgttcaagtaggacctgcattagagcctcatttattaaataagcatgaatggagcgtgttctgtggcttgacacaggggtgagagcagtgagaaaacaagcacagtctgtctttgcccttatgcagtttatccacttaagtggagaatcatgtatttaattaatttccacaatggtaagtgctacaaaagaaaagcatagggtgatttaacagtacagaatgagggggcgggaaagctggcacttggtctgtggggtcagagaaggtagccttaaggaagtgacatttcagctggacttaaagggtgagtaggcaagctccacagaaaggatagggacagctctccaaagaaaagaggacctgaaggatgcccttatggcctgagggagctgggtgcttgcagtaacatgatgacgagtgacccgctatgcgtagcactcctgagagattcttcaagggctgtgcagctaccacacttcccgcctgtaggtagacacctcaaggatttgggtttgtaaatccaggtccgtttcaaagaaaaacattttatagcagcagcatcctctagtgagcagcgaactgttgccaagaggggctcctttccctggcagccacctgtccctgaagcagctccagaacactgtctcagagcccattgcagggcattaattgacaaggaggtgattttgtgcacgatgaagacattgagagttgtctgaatttggacaggcttctcaagcagaaaagagaggcagagtagttgagcagccaagaaatcaatatgtttggtcaacacaggtcacctgggagtgtaacatttgcgttcaccagcagcagcagaatgtgcctcttcagaactggcatgtcaaggaattagctcaagagtcaaaatccaaccttggcacattttggtcccaatgtggttcttttgtgaaacacaacaaagcaattgggaaaataaccttggaaggaaacttgattgatttttcaaagaaagcgagaacttgtgtgaaaatttatcttaagtctattaaagctatcctcctaggcagcttgtaagagaaactaaactagattgcaattccattttgcaaaaaggctttaatgtgttttcccacatttttggcctttgtttcagttatacctgtcaggttgttttattaggtgaaaaaatagctgaccagctgctttgattcactgttgtttttctcctattgatgttgagcgcatctttatgttccttccagcctccaagtacatatatggaagtaataatctgtttcattcaagctaatgatttaaagattaaatatgggttcttcctttttttgttaaacagaacattaacaatttccaaaagtttaatacctagctttaccacttattaacaatgatctgttttgagcctctgttttctcaattgtgaaatgggaataaataaacctgcttcacttactgaagaggatattttggaaagtgaatgagataatgcatgaaagagtgcgttataaactgtgccacactatcgacatgttaggtgttaatatcatactgattatcactatgactaataagaaaattatttacactaggatgcaaagtctatatattctgtgaaaattatgtatgtgctcttcattactcttttctatctcaattttcacaggcacacatgagaacagcatcatagtgacatggagagaggtgtacatccccctcccattttccagagagaaatagaaaaatattttgcaattgttaaagacattgtaatgtacttaaaatcagacatcaaacagtggaacatatatcatagttttccttttgttcaatgacaatgtaaaaatcaaatcttaacatggagatgtgtcttagtctgctctggttgctgtaataaaataccataggctggatggcttaaataacagaaatttattgttcacaattctggaagctgggaagtctaaaatcaaggcactagcagattcagtgtctagtgatagcttgttcctcctagatggtgccttctggtcatgtcctcatatggtggaagggaaaagcaagccttcacagcctctttcgaagggcactaatcccattcatgagggtttgatcctcatgatctaatcaccacctaaaggccccacctcctaatactattgcattggaaattaggttttaacatatgaattttgaagggttacattcagactatagcatgaagactggaaagtccaaggtcaacattccagcagggctcattttgtggtgtgggctctcttcctggcttgcagacagctaccttcttttgtgtgttcacatggcagagagagattgggatctctagtgtttctttgtcttttatagggacatgagttctgtcagatcaggactcaatccttatgatctcatttaaccttaataaccacatatgggcagttagagcatcaatatatgaattttaagggggacacaattcaatctatagaaagatgaaaaaagagaagaaaatgaatactaaaagaatttggataggatagcattgtccgtgcattagaagaaacacccataggttaacatgtaatagcaagaataattttctcctttctgatcacatcatactctctttttcaggtgactgtgacagatggtggtccctctccaaaacagtcaaccatttgggtggtggttcaggttctagatgaaaatgacaacaagccccagttcccagagaaggtctaccagatcaagctgccagaacgtgaccgaaagaagagaggagaaccgatttacagggcttttgcatttgatagagatgagggccccaacgcagaaatctcctacagtattgtggatgggaatgatgacggaaagttctttattgaccctaaaactgggatggtttcttctagaaagcagtttacagcaggcagttatgacatcctaacggtaagatcttccaaactccagcagcacagcagatggggggaagtggttatgttcttattcaagtatactcctttgagcaataaatctttagagtaaaaagtgaagccacacagctgtggaagggttctttctgggaggcaagtgcaggtgagaactcttgcctgtttcattgatattcttaaatgacgagacaatttcctttggttgtgtcctgtcagcattttcccccattcccaggccacagcctgtttcaccacatactcaaccactctttctgcagccctaaatcatcctcaaagtgctgaacatagatgcaaactagcggtaggggaacagcagggcaacacatcctacccaccactgaacatatctctcaacatgtccccgagacttcccatagaaaacaacttttgaaattatcaacaatgtgatagagcatggatatagctgtgtaaattgtgagacacaaatcacaatgatgtttattccataaaaactgaaaaaactcaagtataaagtgactgaattttttattaaattagaaaagtaaaaacaagcacgggcaccatgtcatgtagaaacttaaagctcctgtatctacagtgccagtgtgctcccctgatcccaaccactttagccaggtagtacctattccagaaaggcagctggtatccttacgagcaatgagcatggtccagggtcccaacaaagtcacggtggttcatgcctgtaatcccagcactttgggaggccgaggcaggcggatcacttgaggtcaggagtttgagaccagcctggccaacatggtaaaaccccgtctctaccaaaaatataaaaaattagctgggcatggtggtgtgtgcctgtaatcccagctgctcaggaggctgaagcaggagaaacgcttgaacccgggaggcagaggttgcagtgagccaagaccacgccactgcactccagcccgggtgacagagcaagactctgtctcaaaaaaaaaaaaggcaccatccaccactcttttctttgtctttatccttctctgctaggtctgtcctttattattttaaacgatggcctgagtcccttgatttatcctttctctcctgtggtctagacgtgggctccttgctgtgctcggttatgtgtccagaacagtgggcagagaaaaaaaatatagtaaaacaccagctctgtatctactgttagaagctctgatgtgctgtgtgccattgcagctatgtgagacttgcagtttgggaatctgaggactggatagattcaagtggatactgttggtgtcctgccccaatcccattctcagactgcaagtattggctgtcaatggctcacagctgccctgttctccagagaatcatccttggatgattcttggtgaaagagagtctacattcccagcctccagtctagcagcccacagccactggctgactgacacccagatgcaaaagtccaatccccttgcctcaaagtggattcaattctggtgcaattaatggttcagagctccccatgggatccctctggtcagccaggaccacatcctggtttaactcctaccctgcccaccctgatctctattctctttctcctgagagcacttccccaccaaaaaaaaccatttgtactcaaatgcctgtcttagctcctgggggaacctggcttaagacatgtatcctcaagttttctcaccccgcagggagtttctagggcaaagcaatcatccatgaacacatagcatgagggtgctatgcattgtcactgtttcgaagggctatagctatcagttatgttcctataaatgttattttttaaatgtaatacttgaaagtccttttaaaaatttatttttatttttgttttgctttggcttttgcttcttgaagcttttgaccctcccatttgagtccagggttcacctggactcttcaccctgcccagctggggagggagacttgcttcctcagcccttatatcagctaattgtgaccacagaggagagtcattagccctgtcttcccttccacgctgcctccagggactgtgctatcgagagagttctctgttacctttttgcaggtggcaaaactgaagggcctcaaggcagctagctccaggctgctccctttcccagcccactctatcttgctcctgggatcctgtgctgctatcaatcacatatagcagaagggaggagctgcgaaacacaaccacacactgcaaaacacaaccacacacatacacatgcacacacacacttctgcacgtatcattcacacatatataaggtttcacaatgcactttcttccctttcacatatcaccaccagaggtgaggcttaggatcatgctctcaggaatcaaattagctatttctattcatataactattattcaggcccacaaatcaccacaaactgtaagtgcagcatttgtctttcaaggtctcaatatctgtaaagttgactgtggtccagagagcctctggcaaacatggtgcaaggtctgcacatgactgggttgttcccctccattcccaagtctttactccccagacctctgctcctttcttccccttgctgacactgtgttgaagatggactcttggcccagcaacatgagtgacagatccaaactctacaacaatcagaggtctgagacatctttctcttctctccctgtgtgagtagataaaggcagtggacaatgggcgcccacagaaatcctccacggcccgcctccacattgaatggattaagaaaccacccccttcacctataccattgaccttcgatgagccgttttataacttcacagtcatggaaagtgatagagtgactgaaattgtaggggtggtgtctgtgcagccagctaacacccctctgtggtttgacatagttggtaagttcgagtcttacagagcagtatcatgcaatgtaataattgactgaagcaactaggaaaaaaaaaaaaaagaaagaaagcaaaaaactaacaattagtgccaagattaaaagatgtatagtgctggaatgcaaaagagccagtaaagtgaataatcgacctgtgctttcgttccaactctgtagctaagctgaaccgaaagtgctctctggctggattttccatagtacgttatttactgcaatcttaatgtctttctgtgtgtcatttaaattctattgtcacacttggctaatctcatttctaaatgtattgatggtactagacttgctgtccttcatttctctctttttcttcaccttttttctgcattctgttcttttttttttctgctcccgactgccctgcttcaaggtggcaagcatgctcgagagatgttctatattctacagacagcttgtgggcagaactgttcaacagaaggtacccttagtgcaaacacatttgctaaaatacagctatccaatctgccttttacggtttttttttaaagcaaattgaattacatctttcataactgcctgtgacaggctgaagtgcagcccacagatttcatatatgcctctaacaactattgcattactcgtatccaatgacttctttgtttgaggtttgatagggtttggattttttttgaggggggggttgttttgacttttatttctttgcttttgaggtatgtgggctttttgttgttttgtttttatctttttgtaggttggtttatttaactgggccttttccaatggaaaaagaaattaaaatgtatttcagcccctctgttttgcagcggtagtaccattcatgcaccaaaagccccatcaggagagtcccctggctgtcgtccataagaggaagggcaggaaatggaacctagatatatagccagtcagcctcccccgcaagccgaatagaggaagcagatggaagcatgcaggatagaccctgggagccaacctttaaattccttgaaagaaagcaagcaagcacgccaggctgcaaaaggaaagggcaaaacagccctatggcccttgacaaaccagcagggagaggcgctggagaggaaatgagtgccgaggaccaggaaacaaaacaggctgttgctaaaacagaggggagagtgtgtgtcgcccaatccgacactgggttgagctaaagctgacttcccacgcttctctgtgggaggcaggggatccaggagagagtcggtctgggggaatcatttccttccccatggcactgcctggataggatgggcaggaacctgcctctcccccccaggaatggctgtacttgggaaaagcatttagaaagttccacagcggttttaacaaggcacagaaaaagaacgccccatggcccgcagtcaaacctctatagagagtcctctgaacttccaaaaaagcaaagagctgttttctacgtgtttcatttgatgaaatgatggtggaacatttttgttttacttacttggtattaatcatgccatcgtgtacatgggcatcctcacagcaagctttcacttctttcttcattgctactcaacatatttgaaatgaaacttcttctgatccatgaaaggggtctccatttctttatcttcttagtaattttcagctcattaagatattatctgatgcagtttcttctttcttggcaccacaaagggttgcacgtagtcatggtctggttttctgtacagtcacctttaatgatttcttcacttccacccccagagtcacagaaagtgcaattcagttcttacacgtgcccttagtgccaggtgtccagagacatgtgcaatagtgatttttagccgggcacagtggctcacgcctgtaatctcaacacttggggaggctgaggtgggtggatcacttgaggtcagaagttcgagaccaacgtgtccaacatggcgaaaccccatctctactaaaaatacaaaaattagctgggcatgatggcgggcgcctgtaatcccagctactggggaggctgaggcaggagaattgcttgaacccgggaggtggaggttgcagtgagccaagattgcatcactgtactccagcagcctgggcaacagagcaagactctgtctcaaaaaaaaaaaaaaaaagcctaaaggagaatgcagcagaaaccgaataggcaacagaatgtctagtgtgctgtcctgagattagatgagttgccctttctcatcagccactgatttttctccctcctccttgaacactccagtgtccaagcacctctacagcctgacagtgtcacatctctccctggcatgatccatgcactcaacctgctgacccgtagtacatcccacctaccacccatgtgccctgggatgccctcacttgtactctgcttttgaaatcctactggcatgcctttctgtaatggtcagtctcaccagctgcctgaccctagttatccaggtcaggcttgcaactcttcatcattcctgcatgtgtgtgtgtgactgtctgtaggtaagcatacctagcagtactgcatgtaacctgatttgcaagtttctcatgtcagcatgatgagtgctgctgtatgttttcatttgtgcttatcctgtctccactcttaacccctatggttaaggcccatgtgtcctcattccttcctcctgccaaaacctctgttgctaccaacccaggatgagtggaataaactatggtgaatgatggagataccccaggcagccactatgctaaccctactgatgcctcctggaacctactcagagtcagtgtgaccttccactgtgctactggccacggcaacctacacactatgcacctttgacaaaatagaaacatcattggtccaagaagagagaggcagtttacagatgagagctctccctggaaggagtccctttaagctaccttaaatatagacccaggatccatcatcaagaacatggcatcagttttcatgtttcttcattggtgtatttctaaatgctatacttttcctagagactgccttcagtttcagtgcacttgtaggtctctgaatgaggacctacagggttgtccctctggtctggatgcttccatcacagagatttcactgtaaatcaggtaacatctagccaagcttcttttccaaattgaacttactgggccagatgcccaaacagaacatgattttatttccatccccacatccagccaacaacatcttgaaacaccaaatctttatttcagcgcagaagtaaaatccttttcccaggtgctggttacttcagtattgatatggtccacgttccaccaaatcctccttttgaaaatctttctaatccatcagagtcattttttctcaatctgctgacaacatctttccccttctttaaatacctattgtttcctttatcatattcagatgttttagtctcgctctcaagatttcctgcttatttatcttcagccatggaaactctcatctctctgttcccttcctccttacgtaagcatcttttttggccaagctaacatacagaggaaagagggaacaatgcgcctcaatgcttaagaaacatagcagtgaatgcctggaataggcactaggtatgtaatatcagcatggatctgaaatgaggtctcagatataagtatgggccttgcctaggtaaatactctatgactcttccaagggagtgagaatttggctccattaatagacccagtgcttgcagacacctaaagagacactgagttacagagaagacatcatcttggcatgacacttacagcttactaatgctataactaataaattctcattaagtgagcagaaatagtgtttcagcatgcttttcccctgagagtaaagtcgccccatttctgcatttccaaatctagccaattcttgcttaactgcatttctttgtctcccaccatgatatgaattcacaaaagctgggtagcaagcaagattttgttccaagcctggacccttgcatcgaggatctgtcacacactttcttgtgcctccaaggagaccactgcttacaatattatgcagtgagacttttcagcttccagaaacagaagccctacttgtaactgagttaagaaagctgtaattaaaaggaaacataataaagttcagctgttctgtgtttaaacagcccaacgcacagcatgttccttctctgtgttaaaagggaaagaaagtgaagggaacacaaataacccataatcctttgtggctttatcacatatcttcacacttctcaggggactatgatttcaactccacagctccttgatttacagactctctaatgtgcatgcaatctggttcacagttcagtccctgtatctttattctgttggcaaatatttcaatagagaaggccacctttattacacacctcagacagttcctctttacctgcagatggatggggggtgctgtcacccattttttagcttttcacctgacttaggggagaaaaatagttttctttgtaaatagtaagcacctaaaatatctttctttatctcgcctactgtaaggctgctctttgaaaatgtttctctgttggtgagtgatagaacgtagttccaactccagttgaaatgtctttctgtgttgcaggaaggctgctttgacccttcatttgtcataggttccttcaaactttgggctccaggctgctgctgtgtcataagcttttgcctgtctttcttgaaccttgtccccagtggagccatcgcttatttagagatgaatgaagtaggcccattgaagtctctggtaggactagcagcagccttgttcttcaactagagcttggacacctctgggtcttccctaatcaggtggctgtatttctctagcgaaagactcttacccagtgatatggagagaaaccatattcatacgtcatttctattacagctgctccttcatcagggtgacccttgctccaagtcattcaactgacatcaaacacttcatttcccctattctgccccttttccctaatttgatcccaaataagcctctcatttttccatagcaacagtctggtccataggagcacatctgtagaaacttcaggaaaataagaagaagcctagaaacacttcatatactattaatagttttaagaaaatgaatcctaaactcgattctagaagagattttctttccagccactttttcctgacctccacctggtgtcccctgtcttccaagtaaatatccttttcagccaggtactgtgcttgctttcatttcaaggcagaaaattaggggaaaatgataattggtgtttagcattttcaagatcaaattgtaactggtgtttagcattttttcttaagttcggtgtacatgcggaacctgaatcaacagcttgtgcacaactccctgaattcattgaggttcggcagctccgtgttctggaagctgctcacataacaccttccccttggtgacaactagatgtgggttggtatttttacaattatatgtggagtggaaaagaatcatatgctaggggagggacctggaagctctctaaaggggaagctgtgtgattctcaccattgggtgtctttacggagggacagaggtgcttcgtacccttctttaaagaaaaactagactgaatcacggcccagtgctccaatgcccagcatatttaagcagtagctgctggctcaaaatatttccatttatgtcccatctttaaagccttttgggacattcctacttgggatgtttaactttagaatccaatagaaatccattgtgcctcatctgctctttgtttactctattacacctgtcttgaccgaaaatggtcaaagagacacatccctgatgtgaattatctgttatgtgggctgttcacaacctcgcttttaaccatctctgccgcacacccctgcagcaacgctcaggctgtggcttttctaatttcccattttgttgaaactcagaccagctctgcggtgtcctccctcctccccaccttttgttgagcctaacgctgctgcactgaacacactctggctttgcatgttctgttactggctctgaggaagcacaccttgtttaagcggaatgctgctagtgaaaatggactccttgcatttgatattctcaccctggacgatttggacgtggtttcctatgaaactgaaatcactttcaggctaaaagggagcctgaaaaatgagacctgggggagagatatggagtcgtttatgaaatgggatgcttaagtggtaggttattaaattgtgtgagggttgatggtaaactgctggtctggattctgtgtcccttgtcagaaattcattttaaaactcatggaagattttgttttacattaaatcttagtttaactaggagcaaatgtcctggaaatgagtgtccgaggctgctagctatattggtaagctgagagacatagtttgtaggctctccttcaaatgctcttggctctgctcttggtctgtctcccctgtccctttagaggtttctgttctaaagaatttgagggagatatacacatacacatacacatacaaatacatatatgaacacacacaggaagagagagaactgtaaaaaaaaaaaaaacataaaattagccaaaaatggtatttgatatgaaaaacgactaagaaaaagcacacactctatatgccatatgtaaatgttataccactaagcacgtgcgatgattatgtatttttatacagggccctggggaaaatgtgagtcaaattcagtgagagagagcaaattggactgccccatttaaacagtaactcaaactggaatctatgcttgctggttctctaaattttatttttaatcatctttaaactggagcaaactaaagttttataatttgcataatctttattttgacttgactcacacattttcacattttaaaatgatcaacattagaggatgactccttcccccacctccaaataatatcatgacccaaagatttaagaaagttaacattttggtaaagaaaacattctaaatgtgatttaaaatgggatttaatacccactagaaacaacctgagaagttacattctcatctttccttccatacaggacttatgaggcaattttatgtcctttctttgaaagtttccatggcaaattttttctcagaatgtaccgcttaatagcaaatgatcatgttttttttctcttttgctcatgaagatggtttttcaagacactcaaatcagccttccattttatttcatgttgttatcaacatgaaacattccctttgaataagaaatggtgacctaaggcttgcttcccttttcagcctagactcccccctctctccttatcctatcttcaaacaatttttttggagttaatatttagtgctcctcatcaaatcaattaaagatattaattggaagatgagtctctttttagatgaaattttttaaaaagtatataatctccaagcaattctctgatactctcgtatctccgtaactttaattaaatgtcaagggcaattatattctctcttgcaattaaataatcttaagtgtatatgacagctgcaagcaataagtatttgaaatatatatatgaccaggttttttttaagtaaaccatattatttattccatgtcattgtacatcagattctagtaattcaggtaaaattctccttcccttaactgactattcgtaactgttatataaaagtaatatattgttcattgatcagcaaaatgaaatgcaaagatgtggaatgtaaaaataaaccaaagttagttttctaaaatatgaaattcaataaatacattgccctatatgctgtagttaaataaaattactgtctgagaacaaaatcaacaccatgaaatttcaggccaaaagaaatagagcttgtgaacatacactcatgcttaattaaaattgttcccacatacataccattatttttctccccctcaaaaaaatctttcattttgggaagatcataaaccacactttggttcccagaggtagaaacatcagcagtgatttcaacaatggcagtgttgtcttaagcaaatcactcacagactgtgagttatatgtggccagggggttgagaggaaagtaaagttttctaaacttccatgtaaattgttttgtaatttggtgttatataagctgatgttttcttctacttctttcccaattttattttgtgactttccctaggctttctgcctttttaggagaaaaataatttacactaccaagatggcaaaataagtatttctataaatatcccagcttgcagatatagaatttttaatatgaaatttttttgcttttttttactgtttagaattcataattttatttctgacgtttaattaagggaatctgaattctagcagccaaatgtttaccatcaatcctggaatagattttaaatgtctactcattctattaataataattggactatttatttacttggaatttaatctactttggaaaaaacaaaaagatctacaaatttctaatgcagaagccacaagaagttgaagggcctttaggtttctaaatatttaatggagtcagtttatgcttcactactctaacattactgctgaggtttttctttgcactacattccttttttgtgacatttgttatgcattgtagaggctgtgttttgaactatgaatcaagttagaaataaagaggtcccatttaagatgtacaaaattgagccatagggatgcctgtcaaaaaaaatttctgtataagagctccctttaaagatatatgatataatgcatgtaacaagttatcagatttgctaatttcatgtttctgtgaaatcatcaggggggaattttgacagcgcttttgatgcagagaagggtgttgggacaattgtcatcgcaaaacctttggatgcagagcagaggtccatctataatatgagtgtggaagtcaccgatgggacaaatgttgctgttactcaggtgagatgttaaattactgaatagcaggaatgctgaaagagctgccaaagtcaggggtgcaagcaatgaaaaaaaaatgtaatggaagtagtaaattatgtcgacggttttctagtgtttaaaaaaatcattttcaagaacaagtgagaaaagggattctatagatgatatcataggacttagctgccgctttcaagaagttgtgattgatcatgcatggaaaaataatgcgtgtttctttcctgatcatctactgtagatttatctgtttgacaataaagtcaactttccttgaatttacaaagaggaggacatctatattgcttgagttaacacaccatgttattctttacctcctcattttttttagtcacagaaagttatagctaaagaatacctaagagtccaaattcatttatagacttagataagctaagtgatgtatccaaggtcacacagccttagtaaagaaaaaggactgggatctaggtgtcctgactctcttctgccattctagcctctttgtccttgctgtctgtatagtagaaccccctggttgtggggagaggttaaaagcacccgtggctggaccccagccacagaaatcctgtgtgattctgacatgcagccagggtcgaggaccgctccttatactttgcaacctaagcgcatgtgaaagggcattgagagcaggaggaaaagaaaatctttgggcttctcatgtggcttagtacatctttctgagactagcacaatgttagataacaatatggggcagacctgtactaaatatgagaagatttttttttcttattttttagcaccagagacctaagccagttatggcagagagctggcacacatgcatatgctgtaacccctctcttagtccctactgcgctctgagattcccctaaccccagaaggcatcactaattcatcaaggcccatttttctgctgagcccagatatgtccttagagtgtttctgaacacagtgcttcaggtggtgaaggtgaaatttttgccaaccctgaagcaagcaagtcttgattcatcttaaatatgatgtaagcatttgcaactatgttgttttataaaggagagaggatgaatatttcatgtgtttgcctagccagctgcctcttagtttgagactatttgaaaaatataatgcaactcttttctttgaatctgtttataatcatagaatggtagaatttgaagaaaacaatagggttcactttagtacaactcctttacttttcatttgaataaactgaaaccttagaaaggggaagtgacttgcatataatacgggagccagtgtgagacaatttctgatcctccaacctgtgtcctttcccagtaactaggatgatcatatgactctgtttgccttaaagagtcccatttatgtctgtggaattggcataattattctccttcccttaactgactattaataattgttatataaaagtaatatattgttcattgatcagcaaaatgaaatgcaaagaatgtggaatgtaaaaataaaccaaaattagttttctaaaatatgaaattcagtaaatacagccacagaaatcctatgtgattctgacatgcagccagggtcgaggaccccattaactctcaaaattgccccatttgggatgataaattatatggtcaccctatcgaaaatcatactgtttccgggtattttcaaggctgaaatatagacacatggaaagaacccatggctgaggtgttacgagaaccacacagtccaaaagcgcacccccaaagactaatacaaaacaacccacctgctgtattgctgtcttaagtgttaattcattataaatgtgaatttaagttttaaaaattagccttgtcttagcatattcaaccttgacttcttagtgccacttaaaaacatgacatatttgagtaaaatacaaataaagcatgaaaccgtattcatttccagacttttctccagagtttcataccagttgaattaaatggtattcagtgtgcccagaatacaattatggatattttaaaaattgaatatttttagaacaagtgaatgaatagtagatacatattcagcagagtctatgcagcagatatgctggatctccaaagcacaaaactgattcatgttaaaaacaacaacaaaaattatcaatgatacttttactttagaattttattagaaccagatgagaaatcatttaacagcgtttgttccacaaatatctttagagttcacaccataggctaggagcagttctagatgctaagtactaaggtcacagtgattcacagttttaaatccaggtgactgacatgcattcatttttttcaagttaatatggaaacatgtattacaagactttgaatgtacacactctttgagtcctgtttttgtttattttatttgtggctagtatacagttaggcttatctccagggctgtttagaattagttagagaattaggtgaactttgaggcaccttttggtagggccaagataaggaagttaatgaagggtgccaagagattttcttgtctaaagtattcaagtcactctgtgtctccagagtcatgacctttttatgaagtgggaactaagagtttccaaagtacatacttgtatgtcattggtattgccatcaggaagtcattactctgtctgctgagctatcttagggcctgaccacctcaccagcccctgccaatccaggcctctctcacacttaccacggctttcccagcagtggtggcaggaatgcttctctgaattagtcagcaccctccgtgtcaagaacacttttacaaaaggacattttgggaaataaaaggcattctgaatttcttttggaaaccatgaaagcatgttcccatgcatgacgctgggcaacttaatgattctaccatcaaacagataaccttcaccatataactaaataaatgtcctgtagccccaaaacacctgtttagttttcctttgggaacttttctctgctttgttcatttggaatcataaaacatgatatgacatggggttcaagtcatccataaacaacatgttgaacttggcttcacaaatgtcaaataaatcagatcctcagtgattctgtatctacatgaaaacccttccctcaccttcagttttgtcctattctcccaactctcacaggattcatgtgcctcagagctacaatatctaatgacacacatccttttctttcctgagattccttagggtgagcacaaaacataagaaggtcctgtgggttttaagttgtaaagattccaatgaactaaacgcaagaacaaagcatcccaacactgacaaaaacctcctagcaagatggacaagggcctctgcataaactagttctttattttgtaagggatattattatactttttataatacaatgttagtatttggcaacatgggctttgtagcaggtaattttgcatcccaatctcaactctgtcacgaaacagatgagtcacctcaagcaagccacctaacttctccgcaccctagtcttcttgtttggaggtgccaatacctacaacatggcagttgctatgaggattacatgagtttatgaatgcagagtatcagcatgaggtctaactgtagtaagaattcagttaatattagctactgctgctattattattattcctatcatctgttagcttctctgaggcaaacatggggtttgcctcacatgttgctgtgagaaatgagtctatgttggatcttccacttcatcagagacatcagagccctgtctctgatgaagtggaagatccagtggctgcatccccatcctttagtgaggactattctggatactttctgacttatcctggggtggaaagtgcaagacagtgccttaaggcaccctcggtgcacatgaggtagaatttgtcaagggctctgtggccacaccaggccaaaggtatcttagtgggtttttcccagttcctcatgtgccatcccaggatggccgcctttagtggctctttgatagtcttctctttgcctaaaaccaactggcattttttagtgcttgccatgtcccaagaattatcccaagttttaaaagcttacccattctctacactactaatgttgtggaatgatagcagatagtccattaactgacaccagaattagcatttccctggactaaagaatgactaatgttcactggagtgattttaaaccagcaccctgatgccttcttatccagacccctgccccacttcaaatcctgctgtctctaacaaacccgtgcaaatcaggacctaattgtacaaacaacttaaaccttccaaaacagtttgagttcctaagaggtccttgaagcccatgaacttgttaataaattttggcatgtgtatatgtttttctagagagaaagtccataattttcatcagatgttcaaatgggtatgtgatctaaaaatggttaagataaactaactccttaacacttttttttcagccagtaactctagttaaaaatttcagcatgcagcccccgacactccctgggaaacatatgcacacacctggggggatcattgtcctctgaaggctccccagctctgtcaccgggctgccatggtgtttcaaagcactattgttctgggttaagaaagactgtccaccaaagccttggacagcaaacaggagattcactctctttgagaattttttttaaaaaataggaagattctgtgggagaaaggggtactaccagtcttaaacattacagaagtgttcctcatgttaatgtcttagaagctcagagatgagtgaggatgtctgaagggtttctggcacagggggatgaaaaggttgaaggaatcggtactgtatctgcttggaaaagagttgaggaatcacaaggagcattggctgttatgagcaagggaggaatagagagtatccaggtagaaacagagacccataaggagcaggaataatgaaatgcctaggaggatggggttatcgtccctccaaacataaagtagcactacgaagccattttaagaggaattctacccatagtgcccagactgtggtatttacataccgtttaccttggaaaggagtcaggattcctcatagaaatggataattgcaggtttggggcaggagcctagggcatcttttcctgccagaaaagcctactggaatcatggtaaagcatgacaagaggagacttaaatggatttccactgatcaaagatgggataatatgaacatcaaaaagaataatgggatgagtataacagactgaaacacatgaaatagattaaaaaaaacccaagtgtttacatatatttatcctcaaaaataaaatcatttaactcttacagttactcagtgaagcaggtgctatttgtggtaggcaacagagctctccttcacttccccaagaagatgttcatgttctaatctttggatttgtgaatatgttatgttacatggcaaatgggacttcgcagatgtgattagggtataaatcttaagacacagagaggatcctggagtatccagttaggcccagtcgaatcacatgagcccttaagcagaagaagagaggcagcaaaagggtaagtaagagattcaaaatgtgagaaggacttgagacatcatttctaatttgaatatgaaagcagcaacatgacaaggaattaacgcagccttaaggagctgagagagactcccagctgacagccagcagggaaaccaggggcctccgttctacaaccacaaggaactatattcggtcaaacaacctgaatgattttggggcagtcatccccagagcttccagaaagaaacacatccatgccaacccttgatttcggccttgagtcctcacctacacaactatgagataatcagtgttttaagcttctaagtttatggtaacttttttttttcttttttttttttttccaggacagggtctcactctgtcaccctggctggagtgcagtggcacaatcacgactcacggtagcctggacttcctgggctcaaacaatcctcccacctcaagcctcccaagtagctgacactataggcatgtaccaccacacccagataatttttgtattttttgtagaggtgggtttttaccacgttgcccaagctggtcttgaactcttgggctttagtgacctgcctgccttggcctcccaaagtgctaggattatagataggcgtgaggcactgcacccagcctatagtaactttttatgatacaaatagaaaaataacgtactactgtcatgcccgttttacagataaggaaagagaggcaaagcaaggttaaataactagagtagatcagggtttatatccaggttccagatcctgttctcttaaccactacacaatgctgtctcttaaaagcaagatgaaaattttgatatctgttctaatgcaggaaaagaaactcacctggccctactagttatgaaggagacactcttaagatggtggcttagggaacatgatgccacctgtggctgtcagattgtcttatagtcagccattcaaagaagagagcaaaatacttcagccttctcatagctctaacttcaacccactgagcttttgggccccagagacacacattaccaaaaatgagaaattatgaattttagcacctttccccatacatctgccaaatcaatctgagttactgcatcatcagagcaagtttaaatgaaactagaacatggctctttcaaagagttaatggatgaaaatacatagtaatatatgatacctggtatttatataataattatttaagtaataaggttcttttttttcttttctttattctttttttttttttttttgagacagagtctcactctgtcgcccaggctggagtacagtggcacaatctcgtctcactgcaacctccacctcccaggttcaagcaattctcctgccctcctgcctcaggctccagagtagctgggactacaggtgcatgccaccacgcccggctagttttgtatttttagtagagatgggattatccccatgttggccaggctggtctcaaactcctgatctcaagtgatccacccgccttggcctcccaccgagccaccgcgcccggccataaggctcattcttaagcttattttccctataactctgggatacttaaatcaggtgttatcattacactcatttccagtgagaaattgaggcacagactgcttaggtggcctgcttaggtatacataggtaaagagatataaacctgcttcttctcaaaatcatatacgagtccaggaacatttcctacacatttatatatatgaaatacacaatttaactcattattgaaatcatctggtataatgaaaggagcaccaactcagaattaggcaacccaagttcaagtcagcacttaaccaactgctgtctgtgtaactacagaaggcagttcagtcactttgagactcagtttcttcagcataaagagaataaaactttacatgcctcataaattttaagatgaaatacgctattacaagaagattcttggaatctgtgatatgctagacacatacagactttattaatgtttgtttctcaacttaaaattagctataaaatatgtgtatggctattattgttatttatgaaagacagcagagacagccatgtccaaattataatctaaaagttacattgatttgattcagggactcatgtgattttgtggttttaatgtttttcttattcaagtaatcctttagacttataaggataggaaggccaggcatggtggctcacatatgaatcccaacattttgggaggctgagacgggaggatcacttgaggccaggaattcaacactagcctgaataacacagcgagaacttatttctgcaataataataataataataattttttaattagccagatgtggtggtcacgtgcatctatagtttcagctactcaagtggctgaggcagaaggatcacttgagcccaaaggttcaaggttataataagctatgatcatgccctgagaccctgtctctaaaaaaattaaaaggctgggtacaggggtcatgcttataatcccaacactttgggaggtcaaggcaagaggattgcttgagcccaggtgttccagaccagcccagtatttacaaaaaataaaaaaaaccagacaggtatggtggcacacacctatagtcccagctacttggatggcaggatgatcccctgagcctgggaggtcgaggctgcagtgagccatgatcacaccactatactccaaagaccctgtctcaaaaagtaattaattaattaaaataaaatttaaaagataggaaaatcagcttgtatctctatgctccacagccaaacttgagattaaaaagctctttcagataatctccaaaattctaaagcctcacaaaggcaattaatgaaattggccagtctttctgcaaaacgaccttcatgtattggggctgggagggctgtgacctgaattcctaaggttagtcttgaccttcaatgctttgaggagttcattcttcctctctcatctctaactgctgtgtttggagtttctaattggcctgcttcctttaaaagtaggtttttaccttgaagatgtggactttgttttatggcctcccttcatcctgaacctacttaaaagtggagaagaaacaaatcacttttgccaaagctgctctatgattcactagaacaacagactcccacagggcatctccctcatcagggtttttctttcgtctccttttgtgtcatctgcctcttggcagtgaaaaaggcagtggcttgccgggtgcaatggctcacgcctgtaatcccaacacttagggaggccaaggtggggagatcacgaggtcaggagttcgagaccagcctggccaacatagtgaaaccccttctctactaaaaatacaaaaattagctgggtgtggtggaatgcgcctgtagtgccagctacttgggaggctgaggtgagagaatcacttgaatctgggaggcagaggttgcagtaagccaagaccacgccattgcactccagcctgggtgacagagcaagactccatctcaaaaaaaaaaaaaaaaaaaaaaaggcagtggcctatacttcccttgtgtatttagattaggaaaatgctggaacaactacaaatgtatatagataaaataaggcagcaagccaaatcttaaaatgtaagactttcttttttaattaaaaaaaaaaaaaaaaagacacagcaaggtgtggcagcttatgcctgtaatcccaacactttgggaggccaaggtggaaggatcacttgaggctaggagtttgagaccagcctgggtaacatagcgaggactcatctctacaaaacaaaaaattagccgggcctggtggtgcagtccaattgtcccagctacttgggaggctgaggtgtgagtctgaaactgcagtgagccatgattgtgccactgcgctccagcctaggagacaaaggaaaaccctgtctcataaaataataaaaatgaaattttactgtatgtatagatctgggcttaacaacttatgaggagatcaatttttgaaaatagattctaattttaaagggaccagggatctttatatttaaaataacctcataatgaatgttcatgaaaagagaatggaatcagttatctattttgtaaattaggatttctctatagcaaagtacataatatctgtacacattgtatgtataaatgttaacatgcatttacttttaatgtgtgtgtaacttaatgcacacggaaatgataggatggggtgaatacagaattagctctgtaatacctggggttgagtctggccttgacataggactttaggcatatcttttaacttctctaattctcattttccccactggtaaaccagaaataataaagtctaggaaatgaatgtgatacagatttataaactgtaaaacaagtacaagctgatgtgatttttctacttatacattcaaaaagaaaacttacaagcttgaggagaatacaaggggcttcacccttgaaatcacaactatagaatgttttaaatacggttttgaaatgccagcagaggcagaagagaatttcagtaattcaggacttaattggttctaataaaagacagtgccttcaccctactgctcgccccatggacactttataccatgagcctttgtgaagcagagcttggcatctacccagacttagcttagaagagcctgcaaaacccgaagtgtttgtggtgggcagcattgaaaccagctctgaagagatttcctatattcgggtttcctcctgctttgatttcattgtacttctttaggcatttcaattaccattttgaacacaacatctttgagagttactttgctttgtttgttagttcgggagctcacaaatggccccgactgtgggaaataaaaagtaaatgaggagaaggaagtcttttactgagaaacacttgttctgactgtagattaggcgtaagacaaagcaagcaaaaagaggcaagcttttcaagagcacatcaactttgaaacttcatgaaggtcagggcaggcttgctggccggaaaggctttttcctcccattaatataactgaacacaaatattttagcatcttgactaagttaacttgaactttctgaatgaaagaattggcattcaaagaatctagtatggttctgcaaatacagtggagataagaacaatacccaaaactttactggcacactttttaaccctttttctaccacaaagtactatagggcaaagcttgtcccatgtccagctgactctgaatggcaagttatcccggcatagaggtggtagcaccaccatttgtctctccctcaaaaaaggcatatttgtaccaaagtgagtgatagtgcagccatttatgcaaatagccataatctggttgcatttatttttaaaagtaaataatgttctggaatacagccaaacactaggataatatttaatggagaataactagaggattttttttctattagtcaggaatcagacagggacatcactatattcagtactatttactgtcatgctgtaatagccaatgcaattagacaagataaaccagtttgtgtcataaagaaaaaggtaaaactatctctgtttgcatgtaatataattatatatctgaaaaactcaaaagactgaaaggaaaaacttctataagtgataggaaaataacaggttaaaaatttaatatacaaaaatcaatagcctacatatatataaccaaaaaaaacagtgaaatatatattggaagagaagactctatttagggtagtacatatataaactttaaaaagtgttcaaaacctatttaaggaaaactaaatgttcccagaaaagtaaaacagtagattgaacaaatgaaaaaagacaaaccatattcttggataggaagactacattagaaagaagtcagttttcctttattaacctgtcattatagcataattgcaattaaaaatactatccagtttctatcaggtgctatacaggtttatttagaagaacaagtgagaatagcaaggaaaaccatgagaaagaagaaaaagagagcctagcctttccaaacattaaaatgtactataaagcctctataattaaaacatgttggtactgatacatgagaagtcagataaaccaatggaacagaatagaaaatccagaaatatgctaactgcatgtgtaaatatagagtacaataaaggtggcttctcaaatcagtgggaagtgatggtcttttaaagagtggcattgagataaatggagagccatatggaaaataatcgcagtatgccaggaaaaattgcaactcgattagcgatgtaaatgaaagaaaagaaaacatacaaatgcatgttttaaaatgaatgtgttcatttataacctgaaagctcaaaaaatattctaaactgtgaattaacatccagaaacaataaggaaaaagattgatgtattcacttttgcatggcaaaaaaaaacaccataagcaaaataaaaatacatgacaaaattgaaagcgtatttgcaatttatatcaccaaacttccaaaaataaagaatgagaggccatctaacctatagaagaatgagatgagatacaaataatttaacaaaaaaagaaatgcaaatggatcttaaatatatgaaaagtttctccaacctcactcaaaaataagagaaaggtaaatgaaaactataccgaaatgccgtttctcatctatcagattggcaaaaaatctagaagtcttactacatattatgttggcaaggttgtgagaaacaaacattcttatatattattatgggaatgcaaaatgataaaacctttgagtaggggaaatatggaaacatatataataataaaactatataagcacctgtactttgatccaaccatcccaattctagaaccaaatatatgctagcaaaaaatattttaaaaatgggcacaaggctcttccttgcacactgtttctaagaacaaaaattggagacatcttaaatgaacaccaatagaaaactagttgaattaactgattcatctactcactggaagagtatctctgtacttctgtggcattatcttcaggatataatgcagggtttctccacagcaacactactgacattttgggtcagatgattctttcttgcgggggctgtcctgtgcattgtaggatgtttagcggcatccctggcctgtactactggatgtcagtaacagccctcctccaagtgttacaaccaaaaatgcctccagacactactaaatgtcccccggaagacaaaaccctccccagttgagaactgatgttaatgttatgttaactgtaactgtaatgttaaatgaaacagcatggcagggaagagtgtatatagtatgtttatattaacagaatgtttgatgagtaaaccatacatatttttaaagttatctgtaggagaagggaatagagtgtagggggaaggtatagaagctgaactgctttgaatatatctcttttgtaaatttgactttggtacctttatatataatattaaattaaatatttaaaaagcaagtctaaaatttgaacacaagtggaaacaaatgatgttagatgcatatctagttggtggcacatctacacagagaagaactattctaagtgactttaaacatgctggtttgactttatattcctagttggataaattcctggttattcttgcttgttcttcttaaacctgtatagcacctgatagaaagtagatagtattttaaattgcaattatgctataataattgcaattatttatccaactaggaataaattataatttattttattattataatgatataaatacataattataaaataaaaagaactacaaaataatattaaaattatttttaatgatcatagttataatataataagaatgttggaattattctgagatttttgtgcatgtggttcaaataaagcaatgaataattttgatgatgtcattaagcatgagaaatttcagcatgagaaaaaggagataccaatgtaaaaataatgagattaagtaaaaaccttgatgctctaattttgaataggaagtagcaatatgaactcgtgcaatatttacttttaaaaaaccacagacctttcctgactctgtccattgaatgaaaccgaagcataatagccaatccagtagcaataagtattcctagcagcggatcatggtctctaaattctaactaaaaagaaaacaagccattctggagaaatggataatgggaaaatgcacaagataacactggaaaaaattactggtagcaattatcagaaagcaaggaagctatcaaagaatactagagttatgtcaaaagatgtcaagaactaactggaagaggctcctacaggccaaggtagggctatttatcatcattaatataataactacaatagagagaaacaaatcagatgtgattaaattcatgagttcataataatggttaaaaaagagtacctcattggtcactttgggaggagctaaggaaccaactcactatttcaaaagaataaagggaaagaattatttatcctaactttcctatatgaaatgtacttcacagtaaccaaatagttgagaagtttctttttagagaactattccagctaataaatgaggaagaaaataatagaattagaacattatcaatctgaaatttttaatgaattatctgtataatgattgccagtgtctgctaatatcacagaacaagagagagaaccagatattatgtatctccagatggaagtacactaaatcactcatgaaggatttttgtcaaagaaaaagaaacagaaaaaaggaaattgaaccttagcaagccttttaaatcaaacaatttataagaaatacagggtacagagggacatgtaaaacaaaaccacagcgatgctatgagcaaaattcagactgtggaaactaaacagaaaatggctcagtttcttcaataacaacaataacaccataaaaattgcagggaaatagtaagagaagagtttgaaggagaacctataaattaaaatataattaacccatttatggatgtattaaccaaatgcaatgtttggaccttatttgcatatcttggttaaaagattatgaatatatatatgtgtgtatatgtgataaacaaacaaaacatacttaaaaaacaattagagaagtatgaacaccaaatgggctgtttgatgatattaaggaactactcttttctctgtttaggtgcagcaatggtattgtgtgtgtttgtgtttattctaagagttctgtcttttaaagatgcataccgaaattacatgatgggtgggatttgctttaaaataacgtgggaataggcagggatgagtgggagtttgatgaaaccagattagcaattgattattattaaagctgagtgatacatacttgagtgttcattacactattttatatttgtctgaaaatttacgtaacaaaatgctttatgaaagaaaacaattagaaaacttattgggaaacttcgtaccttagctatcattagcgccacgttctttgctggacccctactatcaggacaaccacagggcatggacactgccactgagaagctgtgactgctctgagtccacctcattggctcctttgcctcttctgtactccttttcccattctgtcactgcctccacagaggtccaccaagagaaacacataataagaacttaagataatggcaacttaacaaactaaggtcatcttgtgatcatatacattgtgcatcaaagaattccacagaattatcaccttcaagtggttgtctcagctgttcaattaatagtgagaatattggtcagctcatagtttatgttcctgctaatataaactactggtttattgtcaacctctaattacagaatgtttttattagtgagtttcctctgtgttgcaagagctactagaagctaggatccaaggacggggaagcggggagaaaaagagggagggcatacttttattagcagtgagcaaattggcattagtcatcattcttttcttcttttaactacaggtatttatcaaagtgctggataataatgataatggcccagaattctctcagccgaattacgatgtgacaatttccgaggatgtgcttccagacacggagatcctgcagattgaagccacagatagagatgagaagcacaagctgagctacactgttcatagcagcatcgactccatcagcatgagaaaattccggattgaccctagcactggcgtgctctatactgccgagaggctggaccatgaggcccaggacaagcacattctcaacataatggtaggaccaaaatcctaattagcactcctacagaaccactgactgttcaggccacacacattagccttcagaagtatagggcccctaaattttataagtagttgtaaatttagtcttttcacagagagattgcattcatttttgcctttttatttcaatgaagaattactgttgttagatagcaactctacatttttgccaaacgaaaatattagataagttctgcagcaatggctgctcagtaaatgctccaaacagactgacttgagagggaaggaacaggtcatgttcccaggctctggggttggtttgcacccagaagatttcatagaaaaattgaaaagacattccttaagaagttaatcacaagggtaatcatttactcagcctatgcaatgctcagtccttggaaggatttacaaaaccaatttattatttattgtactggcactggacctagtagtaaatactggcacacaaaagagatctcaatacatgctcaagcctacagagagtataaatctgagtttgtgttcatggggcctccaaattatgtaggagatattgctttacttttaaagtagtgtttagctagttcacataattgggaagtagagatgaatgagaaacatcgttgattaatttatggcctgaagtctatctcttcaaccacccaagaatctctgcggcattgcacagccacttcctgtcagagcccccactgtgttcctttaagaccaggtagaaggacagacttaatcttctgcactgattggctttaaaatactacactaagacagtacaaattcctaagcagctgaaagtaatgttccactaagtgctactttcctttcataagactagaaaccttccccaacaagaggaagcttgagtgtcatgcacttagctatggtttccagctaagactccaggaaacagatggggttacttatagaggtcttccagtcatcactatggcccttcattcattcatttaacaaatatttctcaaccacttactgtgcaccaaactttcttctaggcactgaagatacaaaaaagacaaagttcctgcaccctaggagcttacactaaattggaactgacctagatttcaacaatccccaaatagagttcagcttggtccttgggtatggcagaccagtctgcagacagggaaattcagcatattcactgagctaattctgcatgtgttttctccaagggcagaaaccttgtgctagtgactaactccattctcatgattctttaagtcatttctgttcattctttctttaacaaactcagaaatcagtttggtcaccctctaccatttatcacttacataattgaatatttacagcaaacaagtgctttacactgcctttttcctagctaagccttttagtcattttgcttattcctcctaggtactatttctgaaaacccctttctctttgatggctcttcttggtatattttctaatttcttcacatctctctgcaggtatggagtttaaaattgaaaaagccaagtgcacatatttgattagtgctacatcaaatgatagcaaaaccttgtggttaaagaaatgattattttcaaacttctgccatatgcaaactaaaggaaactttaaaactgccaagcaaggttttttggtgaaatcagaaaggaggtgcttcagcactttgaagaaaatgacaaatggttgtgtaaagtgtgacattttatttaacatttctctaagtaagaaattaagatttgattcatattcccgatggtcagggttctctcagctctaggcttttgtatatattggcttttttgcctgaaaatgccacacactactaccaccaccattttaccactcctacttgttcttgttacctttttcagcaagctaaatgctaggttagtttcttctcactattctgcgagcatctttagtgcatcccgtgagaatacttagccctgagcattatacctatctattgtttgtattcccacttgactctaagcttcttgagggcaggaactgtatccaattcactgctgaaccaccagtgcaaagccagggacttgaacagataggtgacaataaatgttagttgaatggatgagtgaaaatgcctacattgtgttcattaattccagtctttaattgctcctgcagaggagcctctacccactattctgttatcagctgtgtacacaaataagggggaggccactatatggggagagccagagcacagtgctgtgtttgtgatatcaaggcatcagttctacacacacagactgagcacagaccacaggccagacattaggctgagcagtaaaggtgttgtaaaccctgctcacgatttgctcacaatgtttcctcacttcatgatactaccatttactgagcacctactagaagcctggaactgggtcaagcactttgcgtgcattatttcattttgttttcaccccaaacatagccatgtgagttctttgcaatttaaaatttgagtcccaccacttcttgtattttgcctaaaggtcagagatcaggagtttccttatcgaagaaacttggcccgagtcattgtgaatgtggaggatgctaatgatcacagtccttattttaccaacccactgtatgaagcgtctgtgtttgaatctgctgctctgggatcagctgttctgcaagtgacggctctggacaaagacaaaggagaaaatgcagaactcatatataccatagaagcaggtgagagctgttgcactgcacagatttcagcataatgcaaggcattcgaccctcagtagtatttatcaccatgtaaaattcagatcattaacagtggaacatctctaaatgaacttttttggccaagccgctgtcctatttgggagatgatggtggataacgttcttgatgtttcagtaataggttttccatcattaatagcaaggaaaatttcctttgttgtgtttgatcttggatttttcttggatagagaagagaaaataaatacgtaataaatttagtggcttttacctgtggaccaacaagccagggcctcagactaaaataacaaaagccgcccgccgatcatctgaggcctgccagggtgttctgtgaattgaatcttaacaagtctttgtttacttgtgaataggtggtctgtgggcttcagaaattccttcaccctcatagttagcacaaattcacatcattggaggcaacctgagtagcagagtagatggtagatatggagtctgaactgcttgctgaacctgacaaataaatacaggctcttgttttgttaaatttgagatgttttaaaattaattttaacatctataaggtaagatcatagtttactgatggtttgaagactgatagctagaaagcttttatgactgagagatgaatggctaagcaagaaataacctaaaaatgacaaatatcctttatctgctctatgttctcctccccattccatcttttttgaatattcaagccacctattttcaaaatgttctgcaacttatgtctgtcgtgaataatgccaaatgcaatatcctttcatgccagggatggaaagacttctctcctttcatttaaatgtagagcatttttgagaggagttgaattaaaatatgaatgctagaatgacagttttggactagaaattttagaaaaagaaaagccaacaaccttctaaaaaaaaaaagttctttcattgaatgataacttagaactatttcttgtattaggcacccacattttacatgggtctgtgctaagctctacttaaaaaaagaaaaagaaaagacatgagttcataatagcaaagtttccggagagaatttacctattttttttctaggtttccatggaatttcctttcaatctaaagcctgaccagtgtttttttagaaatgctattttacatcttttatttttcacaggacatttttattacttaattatataatctttgttctttgggttccacaaataatataaggaaacttttccaaaaaatgaatatttaaatcacatcccagaaaatgtcacctaacccaacaactctttttattctttctatggttttttccaatgttgtgtttttttcttttccccgtattcattcatgcatatacattgtttcatgtcactgtaattatttagatatagggttttatttctacttttcttaccatgttctaaacattagctgtgtgtctctacctgctttttatatttgtcattaagcctgctacttatactccttttagatagccagataatgtttcaaccagtttggagtttcttaaggagtaatttaacttaccatccaaccgaaaagactgctctgcttatcttttgacctctacagactacagcatggtgcccagtcgtttctttaactgactaaaacaagacagaacagttatttccttaaaacatctttcataaagaaaacccaaacttccagaaaaccatgggaacaattgatatcgcaaaaaaaatgacctttgattgtatgtaagaaactattgaggattacaatgttcacaataaatctcaaatgaccagcagggctcttcacagacagacagacaaacccacactggtccgcactggtcctagaggagcaagtttcttcccagttgagggtgggagacaggcagatcccagatgcttcagcactttgaagcaaatgacaaatggctgtgtaaagtattatgttttatttaacttttctcacacacatcagataagcaagatttcactctgtttattggtgggctataaatttcctgtctcctgcctgtcctctaaagtaactacggaagctttttattttggcctgaaggactgaggcagaatttgagtgcagagcttcaggtcttatatctagtttgagttttgtgtttggtgtcaatggtgagtctgaggcaggattgtacaagagagactgggactgagttgagttcgggtgagggcatatggatcccaagatgcatatgaatagagagtttaaaatattttttttagatttacctctcctctcaatcattcaacaaatattaagcaacttctttgtagcagatgctgtgttgtgtactagataaggaatgataagaaaagcacagcttttattcaattgccaaaaatctacaagaggccatagattccaaaaaacaaacagaggccaatttttcaggattcaagtgtagcaggaaagaataagcaggaagtggattccaagagaatgggtcagtgtgtcaaagagggaaagaggagaagggcccactttggacctgatgtatcagcacaccattctggaagcgtgtcacaagcagatcagcggccatgggatagcaggattatgaatttctacttgaggccaggcacagtggctcgtgcctgtaatcccagcatttttggaggccaaggcaggtggatcacttgaggtcagaagtctgagaccagcctgaccaacgtggcaaaaccccgtctctacaaacatgaaaattagccaggtgtagtggtgcctgcctgcagtcccagctactctggaggctgaggcaggagaatcacctgaacccaggagacagaggttgcagtgagccaagattgcaccactgcactccagcctggatgacagagcgagactccatctcaaaaaaaaacaaaaaattatatttgaggtcaaaagctggctccctgccatccccaccataatctatctttctgggcatgaagaaatctgccgggtgtggagtgagggaggacttacctagaaactctgcagtcgggcaccataatcagtgaacaccgagatccctggctccagtagcattcatcagtcagggttgcatgttggtgccatcactggaaggtgaccattgcttaggtgaagtgatttccccttataaagttctgtggatcacctgttggattcacactcaattctatgacactattcattgcaagcttgaacgtttactcataagatcattgaactttttattattgtcatcacaaaatggccatgtttaggtggcaaagtaataaatcatgccgacatcaaagacaacattgtttaatattcacatttgggggggctggaatcaaaatgacctctttattagatatactttgtcttttaaaataagcaagtatcttcttgaaatagatgttacatgaacatgaccattttgtgttcagacatggaaaactttatataattagcatgtaggaagaggtatgtagacacatctcataactgccctgaaaatcctggtccctattttaatgattttaacatttaaattatatacctatcatactacaatactcagaaagaaaagtccagatagagttgaataaccaagatctttaacttttgattggaaaggatctcaacacagaagtatatgtgttctttgagaagtatgagaaagcctgataagagaagcaaaaagcaacttggtgagggatgcaacttcacactacccactgcctttcagctctgtcaccacctaccttctttacatactccacattgtgtcttccccattttttattcctctgttatttctctcattctcaacaatcccagatttcgaaccacaacatgtttctgaagcagagctgtaaactactacagtgtcatggccagagcccttcccctgccagctctatcaaagtggggtgcccaggtttcagtttcacaaggattatgtctcaggttcttggttgcagtgctggttcagattcccaacagtttcttggtacactagaaacacctcaaatgcttggtgaatagaatggttacagattgagcaactgccctataactttttatgtttacttttatgtctagatgtgtgcatgtgtgtgttcagaagcatgagagaggggtagagcatgagtggagaatagaagagaagtcaggaaaattcatcacacttacaaggcaaataatgacttgccaagaattctccacacctgactgaacaaaccccttcaccaaagtagtgttttggataaagtcatttttgatagggtgaaataataccaattccatgtagcgaagtttgcttttgggataatcagaaaacaactgactactttataatgctctgaaactattcccacaaccctctttctttaaacctagaacagaaaatatgacactgctacctaaaccagtggcattcatatgtgggcttcccaatctatctgtcttctcacaaggctggaaataaggaagtcctatacattcttagcagaaagatctctccttcgggctctcttatttcccaacttgaatgcacataagactgtgtcattgtcattgtgtttttaacctggatctagaagttactgatctgaaatttactataatactgggaaactcattttggttccttttcagtacccctgaaagagaagcctctcattttatttcagaatgacacagatgagtactataattgctttctacttgccacattgcagtaaggtacctatagataaagagttaatcaaaaagatttcagtgacccacatgtaactcatttcaccattgatttctgtattttagggaacactgggaacatgtttaagatcgaaccggtcctaggcatcatcaccatttgcaaagaaccagacatgacgacgatgggtcagtttgtcctatccatcaaagtcacagatcagggatccccgccaatgtctgctactgcaattgtgcgcatttccgtcaccatgtctgacaattctcaccccaagttcattcacaaagactaccaagcagaagtaaatgaaaatgttgacattggaacatcagtcattctaatctctgccatcagtcaatctaccctcatttatgaagtcaaagatggagacattaatgggatctttaccataaatccatattctggagtcatcaccactcagaaggccctggattatgagcgcacatcctcttatcaactcatcattcaggccaccaatatggcaggaatggcttccaatgctacagtcaatattcagattgttgatgaaaatgataatgccccagtttttctcttttctcaatactcaggcagcctaagtgaggctgccccaattaatagcattgtcaggagcttggataacagcccactggtgattcgagccacagatgctgacagcaaccggaatgctctgcttgtgtatcagattgtggagtcaacagcaaaaaagtttttcacggtggactccagtacaggtgcaatcagaacaattgccaacctggaccatgaaaccattgcccatttccattttcatgtgcatgtgagagacagtggtagcccccaactgactgcagagagtcccgttgaagtcaacattgaggtgacagatgtgaatgataacccacctgtttttactcaggctgtgtttgagactatcttacttctacctacctatgttggagtggaggttctgaaagttagtgccacagatcctgactctgaggtaccccctgaactgacatacagcctaatggaaggcagtttggatcattttttaattgactcaaacagtggagtacttaccataaaaaacaacaacctctccaaggatcactacatgctgatagttaaggtgtctgatggaaagttctacagtacctccatggtcaccatcatggttaaagaagccatggacagcggcctccactttacacaaagcttctattccacctcaatctcagagaacaacactaacataaccaaagttgctattgtcaatgcagttggaaatcgccttaatgagcccttaaaatacagcatcttaaacccaggaaataagttcaagataaaatctacctcaggggtcattcagacgactggagtcccctttgaccgtgaagaacaagagttatatgagctggtggtagaagccagccgtgagctggaccatctgcgtgtggccagagtggtggtcagggttaacattgaagacataaatgacaattctccagtctttgtgggcctcccatactatgctgctgttcaagtggatgcggaacccgggactctgatttatcaggtgacagccattgacaaagataaaggtccaaatggagaagtgacctatgtcctgcaggatgactatggccactttgaaattaaccctaattcagggaatgttattttaaaggaagcattcaactctgacttgtccaacattgagtatggagtcaccatcctagccaaggatggcggaaaaccttctttgtctacatctgtggagcttcccatcactattgtcaacaaagcaatgcctgtgtttgataagcccttttatacagcatctgtcaatgaagacatcagaatgaacacacccatcctaagcatcaatgccaccagtccagaaggccaaggcatcatatatatcattatcgatggggacccttttaaacagtttaacattgactttgacactggggtcctgaaagttgttagccctttggattatgaagttacatctgcttacaagctgacaataagagccagcgacgcccttactggtgctagggctgaagtcactgttgacttgctagttaatgatgtaaatgacaacccccctattttcgatcagcctacatacaatacaacactatcagaagcatctcttattgggacacctgttttacaagttgtctctattgatgcagactcagaaaacaataaaatggtacattatcagattgtccaggatacctacaatagcacagattattttcacatagatagctcaagtggcttaatcctgacagcacgaatgctggaccatgagttagtacaacactgcactttgaaagtcagatcaatagatagtggcttcccatcactgagcagtgaggttctcgttcatatctacatctctgatgtaaatgacaaccctccagtttttaatcagctcatttatgagtcatatgtgagtgaattagccccccggggccattttgtaacctgtgtacaagcctctgatgcagacagctctgattttgaccggttggaatatagcattttatctgggaatgaccggacgagctttctgatggacagcaagagtggagttatcacattgtccaaccatcggaagcagcggatggagcctctgtacagtctcaatgtgtctgtctctgatgggttgttcaccagcactgcacaggtgcatattagggtacttggggctaacttgtacagccctgccttttcacaaagcacatacgtagctgaggtgagagagaacgtggctgcaggaacaaaggtaattcatgttcgagccacagatggtgatccagggacttatgggcagatcagctatgccatcatcaatgactttgccaaggatcgattcctcatagacagcaatgggcaggtcatcaccacagaaaggctagaccgggaaaaccctctagaaggggatgttagtatttttgtgagggcccttgatggtggagggagaacaactttctgcactgtgagagtgattgttgtggatgaaaatgacaatgctccccagttcatgacagtggaatatagagccagtgtcagggcagatgttggaaggggccacttggtcactcaagttcaagccatagatcccgatgatggagcaaattcaaggattacttattccctctatagcgaggcctctgtttcagtggccgacctcctggaaatcgatcctgacaatggctggatggtcacaaagggtaattttaaccagctgaaaaatacagtgctttcgttctttgtcaaagcagtagatgggggcatcccagtaaagcactccctcattcctgtctatatccacgtcttgccccctgaaacgttcttgccatcattcacccagtctcagtattcctttaccattgcagaagatacagccattgggagtacagtggacaccctgaggattttgcccagtcagaatgtctggttcagcacagttaatggggaacggccagaaaataacaaagggggcatattcgtcatagaacaggaaacaggcactattaagcttgacaaacgccttgaccgtgaaaccagcccagctttccactttaaagtagcagccactatacccctggacaaagtagacattgtgtttactgtggatgtagatatcaaggtattggatttgaatgacaacaagccagtctttgaaacttcaagctatgacaccattataatggaagggatgcctgttggcaccaaactcacacaagtgagagctattgatatggactggggagccaatggacaagtcacttactccctccactcggattcccagcccgaaaaggtaatggaagcattcaatattgacagcaacacgggctggatcagtaccttgaaggacctagatcacgagacagaccccacattcaccttctctgtggtggcctctgaccttggagaggcattctctctttcctccacggccttggtctctgtcagagtgacagatataaatgacaatgcaccagtcttcgcgcaggaagtgtaccgagggaatgtgaaggagagcgacccaccgggcgaggtggtagccgtcctcagcacctgggacagagacacatccgacgttaatcgccaagtgagctaccatattacaggtgagtaaatacccccagttttcattatgtgcactgctttataaagaaagatggaagatggcggggagaagagtaagagagaaggaagatgggataaggagtccagtgtaatgaagcctctctggagctgagtaaaggatctctgagcagactgcgttttttgcttgttggctgttgctaactcagccttagtttggagttcacaggtttgctgtaaatgtgttaaccatattggtaactagtctttgtgtcacctcttcctatttaaaaaggagtccagccaaatatctcagttgaaggaatgaaaataacaactttttggtggagaggttctgtttttaagcatgttccttttttctaccttttgcaatgctgagcaaaacaaatagcttgatcacagtaagcttcacatgcacacttcccctggccatggcaacacctgtgcacacatgtacacacattagatggaatggtttgatccttccctgagaaatcctaaattatcactacaaatcaaggggtatttcttctgacaaccaaaattttttggatttcttttctgtctttcagaatagcaagtagcaattcaagaggaaagccaagatagacaaagtcagtcattaggaaggcacagaaaatgtcactgttgccctgagaggctaaggatttcatgtcagagtggtttcctggggggcaggcgacctttaactgaaagaggagagggttgacagtgtgggaaggttcttcctaaaaactatttggggggtgggttaaagctaatattttgatgtcgtcacattcaaaggcagaacataaacaaagtgccaaaagattgtaaagaatcatcaatacttgtagtcaggtggcttccgtttagaaaaactacatcattcagagtgaaaaatgaattaattagactgcccttaggacatagaatctgcttgagtatgttagtaggaaagttaattaatcactgcagaataagatccacagtagagcaaatgtgtcaatgcttggggttgccacacttttcagcatgattcccttcctttttcttcatgggactgttctcttggtgaagttttccccttgaaacactttatgatctatctgagacctcttttttgattaaaatatgtatttctgcagttaaaacatgaaagatagaagaaagaggtgagtgaagcatgactttaattcatttgcatttattttcaggaaaaaaaaagcttcttaggcattctgaagggtccttttctatttggagaaactgtaaaatactcagccttaattatttatagatagcctctgaattgtcaatggatgatttaaagggactatcccatcgactttaccaaagtaatgagtacagagtagcttaaagctactgttactattagcagtgccaaccaccaactgattttaattagatttaacttttgctcttgatgtaacacaacttggctgtgctgcctccaattaacaaaggaccattaatcattttatgtaacaaaagaacactgtgggcctgcactgaaagcatttaatagagaggttaagtttgtgtgcactgaaataatattcaactaaagcataattgaatcctggccagtggtgaaggaaagtgatatcccagggaggaccctgaagctccctagagcagggttgctcagccacaccgctattgacatatggggccagatcattctttgctgaggaaggctgtcctgtgcactgtaggatgtgtggcagcatccctggcctctacccactaaatgccagtagcacataccaccaccatcacttccctcccaccaatgtgacaagcaaaaatgtctccagacatatgtaatgtcaatacacatatccccacagaggggaagggcacagttgtccccagttgagaaccactgccccagaggaataggcagctctcaccttttctgcactgtctggctgatttggtttcattgtattccactgtggcttgcccccactcccagtgctgaggccctcagactgagcagccccttgcattataagcaagaatgcagtctggcactcagaatcccaccccttcccactcagtctcttcagtaggaccccgatatttgccctctgctttttaaagattcattgtaagtgtgagatatggctccaagttttcaatgaagtagcagttggcatgcagtatactttccttacttgtttattttcagtctttccctccagaatgtgatctctgctgagacagcagatatttttgctggttttgtccactgatgtagccctgctgcctagaacaatgcctggcccagggtatatgataaatacttgaatgcccaaataaatgaaatagtgatcatcaaacctgactcctgacttaccgccagtggtcttctcagtctttctcggtgtctgaaatgacatttttcccttcttacggattacatcaaggtcatcatcttcttccttcctcctcctatcttgttccccaagctgcttttgcccccatgtagcttaatgatgtggaaaagtcatattgctgggaccactgtccatgcttcagcatcttagaaagctgttccacttcatctgttttcttttcttccatgttccccagcttcactctgatacatttggtctaattgcagtgcttatctttgaactgctttttaaatgacccctcgttagggctatttaacactaatgggccctcctctgtcgtgaaaacttttctccgccaaactccagttcttatgagaagagcgcagctgtatgataaaggcttcattaaaagattccttaatagaactaactgcctttccttgactgcataatcaacggctaatgaaattgtcttggtaacaagagctagagtgtattacatcctctcttgagactaagtggaaagacgattgtgtcagcctgagaagacgattgattgttcacagtttgaatttgattgttcttaaggggaactaaacaagagatcatctccagcttctctaagtggattttattatcttggaaagttactgttttgctttccacagaagccaagcatataaatatcatgctttgttgcccaagaatcaaagggagtctcagtatctttgtagtatcctaaatgatacagtttaaggagtacctggatgactccacatgcacctctcaaggtagatgtagattaagacatttcattgcacatcttcaaaagctcttttgtttttttaactgcaggaggaaaccctcgaggaaggtttgctctgggcctggtgcaaagtgagtggaaggtctatgtgaagaggcctctagacagagaagaacaggacatttactttctcaatatcactgccactgatgggctttttgtcacacaggccatggtggaagtgagcgtcagtgatgtgaatgacaatagcccagtgtgtgatcaggtgagatttggggatagggttctgcttttactctgcttctccaaaataaaataaaaacccatttcacttttcttcttaaggccaggcaaacttctgctcttatctgcaattgggtgtgggtataagagggtaggaggtgaagtttaggaagaaatattgaaaacatgaaaagagtataggtagcaagatcagatacctaattttgtaccctgcccccaacaaaaaaaaaaaaaagaaagaaaccaatgtcttaaataattttttgagtaattcataaaggactttaggacttattctgtttaaatcactgatatcataaaagagaaatggaccactctacaggatgttaacttgtttatataagtttacacatttggttagtggcaatgttggtgctgaacactggtctccaggctccttatgaagtggcctttctactactatataaaatataatgccattgcaaggtacaagtactagattttattttctctcatactgaaattaaatcactatttattcttttctatcatgtggaccaagagacaatattggtgtcctatagattagaaaagtattgcaaatagatttaatctctcatactaatgccaaatgctggtagtggctctttaaagagttgaagagaattcctaggacttactggggctcaagagaaaaacagacagccatggtcaatgtgtggtgtgtgttatggttccacaagagtggggatgttcctctgttttctttgccgtggtactcttagtgcttagaatggtacatatagtggatgctcaataaatatttgttaaatgaataagcatgggagtggaagagcagcagatatactgtgtttcataatatattgaaatatgtttctgtagtgaaggaaaaaaataacaaaagctaaattatataaatgaatttttaaagaaatcctatataatgctaaatatggcaattgcccccacaaatactaatgattttattacctttcttcacctttgtccaggttgcatatacagcattacttcctgaagacattccatcaaataaaatcatcctgaaagtcagtgcaaaggatgctgatattggatccaatggatatatacgatactcactctatggatctggaaacagtgaattttttctagatccagaaagtggtaagctaaaatttattattgagataaatgtcattgttaattcatgagagaagttaaacttatgtggtctcatcactagtaaatagttagtagtatacttactcttatagggatggagggaaattttcccttccatcctttctgaatgtttgctgaaatgaactgaccacagacagattaacaggagaaaaggcatatggatttacttatgtgaacgtgggtaacacagccccaaaaataagagacccaaagaaaagccagatggttaaggctgttgctaggggagagggaagttgggggactgtaggcaattttagaggagtagtcaatgatttttaggggaaatgaataatctggagggcatccattattttgtaaataattctcctaggaaactcaatggaactggaaaatgtggggaggtgacggattgaactgactgtgaacaaaggttatctagttatgcagataaagtctcccagttaatctctaggagcttccctcagaagaagagatgaaaaatctgtctggacatggtgatgacttttagtctcttttctcttctctggtggtgaatctttcccagttatttgatgagatttctatggagggggatcttaagacaaatgcatttcttttggaaagaagttttcttagtcagatgaggaaatttcaaagagagtcttcacctgcacttgagagagatgagggaaataagagaaagtttgaaagttcttggttctaaggcagctttaaggccttccaaattttttttaattcaaggtgctcagcatgtcaaagcaccatactttggggtatcattctctgtaccccaagaatatgatgctcagtatcttgggctctaagaaattgtagggacatatccaaatatgggtactctggaccacagaaactttttattttctttgtaaaacttgcccagactttacctacatttattagcatcaagtaagcggacatctctgtttgcttctcttgtttctcgtatctgtaagttttaaggtatatgctcgtaacaggtataaatgaagttgtatcacaaatgcaggttgccacgaaaaccagacagcaatttataggaaggagaatttttctcactttgaaatggctttagggtccttttctgattcttattaacacagttgtctagtttttattaaactttcttgcctagtttctccaaacctataagccctcagatttgcttggttgtatattcaggtaaaactgacaaggtgcaaggttatgtaagctaaaggcagatgcctgcattgaaggccagagctaatggaaaaaccttttatatggtagcaaattattttagttttgtagattagatgacccatccaatgacattttaaatttaagcgtaaagattggctggcttgcatatttccagtgttgtgttggttctagtgaacaataactgactattgagtctccagaaaggtagtggctcctccctgccccagtcttgtaagaggttgcatcctacaaggaagcactgacttagctacatgggaatatactactcagctatatgggcctggtgattatttattcaaaaggtaacatttattgagtagccagtagacataaaagtattttatgggatatttgtggtagactccaagataaacaaaataaatcatgcccaggggatattgtaatccagtagggaagacaggcaagttaaccaataataacaatcaaggcacaatgaaatgagtgttcaggagaaacataaggggagctatatctgggcacagatgaagatgtaactaatattctgataagaggaaaaaggaaactgcttaaaggaagaactagcatttgaactcagccaggattctcagtggcttaaacaggacactgcaagttataggaacagcatgagcagagagcatagcgcatccaggtaatgtcatatacaaaagtggagggaaaactactttaggccagattgtggagtgtcttgaatgtcccaatgaaaatccctggatgctttttgagtaggagagggaaatgatccaacctgtatctgagaactggctggccatagccaggaagctaaaagatgaactgccttaataaatataggtagctttggccagcacggtggctcacatctgtaatccccgcactttgggaggccgaggtgggtggatcacaaagtcaggagatcaagaccatcctggttaacacagtgaaaccccgtctccactaaaaatacaaaaaaattagccaggcatggtggcgggcacctgtagtcccagctacttgggaggctgaggcaggagaatggcgtgaacccaggaggcagagcttgcagtgagccgagatcatgccactgcactccagcctgggcgacagagcaagactcagtctcaaaaaaataaataaataaaataaataaataaatgaatataggtagcttcatccaaataatatctactaattttatttaagattgataatatttcatgagtcatactttccaccaaataacatttattcaggtttgtcactgtgcttgttgtcattatcttatgaaacttaaacaacaaaaatatctccacaaaagctggtttccagcaccaatgcagctattccagtggttaaaatatagacataacattactccacgcgggatgctaaggaactgcttttccatgctcctcaagttttctccgacttgactcctccccaagcaatgtcaggcccttccacaatccagcaagttaagggttaacccttacacaataggggtccttcaagaccctgccccgctaaagccagcttctgttttcattacctgttttcctgtaaatgatagagcaaaaagttgagtatctggaggcaaagagactgcctttctgggtctatgggttgttgacaatattgaccatcagagaaccagatataccagtccattctctgtgtgttttctggacatatagcagaaatccagagactgatctccagagtagatcttgagaggtttaaagaggtttgaagcttctccgtgtagccaaaagaaagagccccttataccagcggtttcaaaaagggattaattaatttgaaggtcacacagctgttttgtttttgcatctagaatcccatacatttttccctgacacataaactgttgaatttgctacatttttaaagtatgggacacttgggccaaatgatgttagtccttcctatgttgagaattgtttgtataattggtcctctgctctccaaagaaagacagtttttaaaaactcagaccaatcatgctgccatttattttcacaggcgagttaaaaaccttggctctgttggaccgggagaggatccccgtgtacagcctgatggccaaggccactgacgggggtggcaggttctgccagtccaacatccacctaatcctggaggatgtgaatgataacccccctgtgttttcttctgaccactacaacacctgtgtctatgagaacacagccaccaaggctctgttgaccagagttcaagccgtggaccccgacattggtaagtcagttgcaggcatctccctgtcacacagtggacactttgtcttcaggtgctgccattcctttagttttataagaaccttaatcaacccccttggttctttaccacgagaacatgtacattaaaccccatttcagctattcagctaatacacttcatatgcatgagaaaagtctgcaagttggccctcctctttctcgagtttgaagaagagatactaagaagtcttttaccttttagcaaaggagtttgggttggtttgtttgggttttgttttgttgtttttagattttgaccttttgaataaaaatgatagatttcctcattgtcttttcctcctaaacatagtcaaaaggctatgttgtgaagcaaggagaatttgatttgtttccatgtctatgaagaactcggtcacatgctttagctgaaatatgacaatctcgatttaatatagtgccccgtagtgcaaagactaattactaaatgtgctgccagtccaacgtggattttttaaactgccattttacaaagcatttttgtcacatataaactgacattgtttgacagagtgggggtgggggagataaggaattagaattgaaagttgctaataaagtttatgctcagatccactttacataatgagatggtgagttagaaaagactggagttaattgctaggtagaccttctgagaatgcataagttattgaggtgactgcatgatggaatataaatacaaaagggcatatagacagcttctcggttgtgcattttaagagctgtaaatcagagtactaggaaatgatgaggtgtgtctgctatgctaaacagacctttatataattcagtgtcatattgcttaattctgaattgaaagaaaaattattggactaatggaaaagtaaatacatgataattagttgaaaacaaacgtagagcctggggcctctgcatattttcccttagagaaattagtggctacaatttgaattattgctgttacctcattagcataattttcaaggctgagaaccaaccctttaaaagtctacatattaaagagctttgtgaaaaatggtaaacaagaaagacctcttattgatatatatttatgtaatacctacaaatagtctcttttttaaaggaggattagaaaacattctctggactcttattagcagatgactttggggaaagagaacagaattaatggaaatgaatcacttaatcattttaaatttgattttgagaatgtataattaggccatagatgatattttaaaagctgaaagattggaatttttctccacactccatgaaggaattgagtgtacccaggctactagactggacatggacgtctgattagtgcacatggtgttttttgaaacatgagggggtggagtggggtgttactgactcacagacggtgtgcttggagctgttttgcaagttgtgaagaacatactatgtcctcctttcacttattttgagtcagatggccaggttgggagttggggaggaaggaatgtctagattctaggcatttaacagggcagagatgataaagactttaaggaaccaaaactggaatgaggatcttaccagtaccttgatctactcattttttgctaatgagtaagagcttatattcaaagcttcaaatagagacagagattataggggtgctgctggcatctatgtataaagtatactcaccaggccattgcatcagccacaggaaaactgtggcataagataccagattttagttcattttctcagtttttgtagatttcttttagctttaaaatgtaaaagaactaagacagctgaggaagaaccaatgaatatttctaacaacacagactgagcacctactgtgccttagccagcatactgacgaagtggttgtgaaggtcttggtcagagtagacaggagattccagttgcagcagcgtcagtctgagctgcaatcaaatgaatgctgacattcttcagaatccctgggtatcaatgattggtacactaattttcattagtggcctgatcagaacacttactgcctcaaaagtgacaatttctccgtttcctaagagattacaaaccagtgtgagctgtgcactaagattaccaggttgttgaaggtagaatttatcttggagccaaactgaacctctgtctggaagctgagtttgcacatcaatagccattgcacacaaatctggctttctagtttggcctctatagtgttcaaaagagaggccgaagtgggcggatcacgaggtcaggagttcatgaccagcccggccaatatggtgaaaccccatctctactaaaaatacaaaaattagccaggcatggtggtactacgcctgtagtcccagctactcgggaagctgaggcagaagaattgcttgaacccgggaggcggaggttgcagtgagccaatattgtgccagtgcactccagcctgggcaacagagcaagactccatctcaaaaaaaaaaaagaaagaaggaaacaaggaaagaaaaaaaaacttataatagctgttaatatttaaaagtcagaattttattagaaatttagatttccagcattttataaaaacaacagcactcagaaggccctgcaattccaggtacacaggtcccacatggcaggagctaaagagcaactgcatccttgacactggccacagcactaaccttgcctcctgctagccactttacttgcttattgatatggtttggctgtgaccccacccaaatcatatcttgaattgtagtttccataatccccatgtgtcgtgggagacacctggtgggaggtaatttaatcatgggggcggttatcctcatgctgttctcatgatagtgagtgagttctcatgagacctgatggttttatgaggggcttttcccccttttgtttggcacttcccctttctgccatcatgtgaaaaaggatgtgtttgcttccctttgaccttctgctgtgattgtaagtttcctgaggcctctctagccatgcagaactgtgagtcaattaaaccttttccctttataaattacccagtctccggtatatctttattagcagcatgagaacggactaatatacttgtgttacctcctgacctcgtttgcagatccttctctagaatgacaaggaaaggtcttatttttaagctttttattttgaaataattacaggttcacaggaagttgcaaaataatatatagggaattcaagtgccccttcacccagcccttctcccactggtaacatcttgcttaactatagtaaaccatcagagctaggaaattgatcttggtacaatccacagagtttattcaaatttcagggtgtttgcctgtatatatttctatgcaatgttatcacctgtgcagcttcatttaagcaccacattcatacatcacacgcctcccacttgctgcccctttggagccacacccacccactccctgcacctgcttcccaatccctaacccctgacaaccactgacttccatatctataattctcttatttcaaaaatgctatttaagttaaattatatagtttgtaaccttttgagattggtcttattttttcactcagcataattctcttaagattcatccaagttgtctaattggtttttgatcctgctgaagatcattggctacatttgtgtaaatgacaggcatatttgattcatgaaacttctttggttaagcacattgctttaccagaagttgtaaattattccaccagtgctatgatctgaaatttgtgtccctctaaaattcatacgttggaacctaattcctcatgtgtccatattaagagatgcatcctttgggaggtgattaggtcctgagggctcttcagtgcccttataaaagaggcttcagggagcctgttcttctcttctgtcatgcaagaacatctagtgtctggtggaggcccatttcaaatagaacgtgcccccaccaacaccaaatctgctggtgccttgatcttggacttcccagcctccagaactatgagcaataaatttctgttgtttataaattacgaagtctcaggtattttttatagcccaaacagattaagacagccagcgattgactacaaaatataccgttcattatgaattgcagagaaaagacaaggatataatctgaaatctgactctgtgacttgctaaaccttcatatcctgatttaagaaatttaaaatatattattgcttttagccaaacaactctttttctatgaatcacttataatgaactaacattattgttagagtcattgcctgggtcaggaataaaataaaaacagaagaggacaagataattttacacctattttatgagttctaagaaataccgtggcaactctctagattttagcatgaagttcttagttttcctgtcaattggaaatatctttgcccccataaactggtgacatgacttcatgacccaacatttataaaaaaagggaagttaaagggtgaatagtagtaaaatgaatagttgttaaagggaacacacataccgttaataacacatggacacagggaggggaacattacacactggggcctgttggagtgtaggggacaaggggaggaagaacatcaggacaaatacctaatgcatgtgggaattgaaagctagatgatgggttgataggtgcagcaaaccaccatggcacatatatacctgtgtaacaaacctacacgttctgcacatgtatcccagaacttaaagtaaaattttaaaagagcaaatttcccagaatgaataggatttccacagtcaggggtaggaacacattcaggaagataggagccaggaagttgggaaagtgtggacccaactaaatagttgagagaacatcatgtagtccaagagggaggagagattaatgagataggaaaagtagaccgggcctgattgtggttgtttgtgaaggccacttaattaaacagatggaaatgaaccattgagcacatttgagaaaagaaataatgaatttggagtttgggggatgctaatctgataggagcttctgaaatgaattggaacaaggaaaaccagggactaggaaagctcctaggagtgtattaagaaaaacaataagggccaaaatgagagtggtggctttgagatttaaaaataaggagctggtgggctgggcacggtggctcacacctgtaatcccagcactttggaggctgaggagggcagatcacaaggtcaggagatcgagaccatcctggctaacacagtgaaaccctgtctctactaaaaatacaaaaaattcgccgggcgtggcagtgggcacctgtagtcccagctacttgggaggctgaggcaggagaatggcatgaacccagaaggcagagcttgctgtgagcagagatcacgccaccgcactccagcctgggagacagagcgagactccatctcaaaaaaaaaccaagtaaataaataaataaggagctggtgaaagccagattgagatttcagatgtgaaatctgtagattttggcaactgactagactaaaagcaaggtaggctatttagtcaaaatttcaaacatgggcaccaggtgaaggtgctgcatgagcagaagtagcatagacggtcaacagtaccacctggcatggagaggaagatgaaacatggggacacattgggaattcaagtgtgaacctccagaaggaagtcaggaataaagacatgtttgctcatcgtgacagtcttgccttcaaggggtttacagtcatagggagaaacagatttgcacaacaagattccaagaaaacaatgaagaatgtggtaataaagtcacatctgtaaaactaatgattttgtaaggattggtcagatagcacatgtaaaatgctacataggtccatgtgggaacattacaatgtaagcaatgaattttcaactgggacaactcaggaaggattcaccaaatggtattagcacttaccaaaatgctaagagttgggacttgaacttggatggagatagacagaggagtgagacagagagacagatagatggaaagatgagtgttagccaggacaggcttggcaagactgagatcatttgtaggaagtctgagtggcttagcaaagcaaaagcttatttcttgcccaggtgaaggacaggtcagtgcgagtctatctagtgactcagaaatctggtccctccatcctgtcatctccaccttctgacctttggcttccaaggtcacagcagaggggaagagagagatgaaggcagcatgccagctgtcagctgcctcagcctgggagagaccacatcactccaccactatccactgcccagaaggagtccctcaggctggcccacctgcacaggagcagggacacataggggaggactggggagacttggtgagcactcattacctctgctgcaatgatgaaagcaggaaagaacaactgccacagtgggtcccaaagaggtcagagaaggtgacatcactcatgagcagggaaagttagcctcaagggtgtggagggaccacttggctttagaagtaaaaggaaagagctgggtgtggtggctcatgcctgtaatcccagcactttgggaggcggaggcgggcagatcacttcaggtcagtagttcaagaccagcctgaccaacatggtaaaaccccatctctactaaaaatacaaaaattagccaggtgtggtgacgtgcgcctgtaatcccagctactcgggaggctgaggcaggagaatcacttgagccaaggaggtggaggttgcagtgagccgagatcaccccactgcattccagcccaggtgacagagtgagactccatctcaaaaaaaatcaaaacaaaaataaaaaagaagtaaaaggaaagagaggcagaaagggaaaattgaaacacaaaggaagatgctcaaagggagatgctaaggaaacccactgagaggcacacacatgccctcggatgtctctatacaggaagggactgccatctgagataagcagggcagcagctgggctgagtgccctgaggagatgcaggagtttgtttcagggtgaggggaaaggtgagcgggagtcagtaagaaatgaagaagagaacatctcacccagtgagggctctgtaggtgccagattatttaatacatgaatgggcagtggtcccaatcagtaaattgcattaatagaaaatatgaaaaattctgagtcttccagaatactgcctttcccctaaagttaatagtttgatcctcatattaacagaaaattggaaagacactaagagaacttatcttttgatagagcttccctgttttgccccgagtgtgtatctcagctgtcctcagcttcctccattttgtgctggcattcactaataatggtgtaagcttgctgtctatgttgggaatttgtttagtgagtatttcatgagagagatagcgtcttgaaccctgcactttgctctcagagggaagatactggaatgaactgggttttccaaagcaaagctcttttcagaggaagtacagggctggcccagggtcatggggcaccatttgccctgacagcatagctgcctatgaaggaggaatgtatttatttgagaggaatgtgcatgaaagtgaccactaacgattgttagatggagatttttctgaccaaaccaccttcagtgaatctctccagtggttttcctgcctcttctgacacatctcgccttttttgtctgccactttttgagagccattaaccgagacttaggaagaaaagcttggaggtgacaaaagtccactggaaatgtggacgagatgctgcaactctagtggaaaagcatctcacatgccctgggttctcagtttcctgtatcttcttgggacagagtctgaggaagtgttgctcaaaccaatctgtaagaatcaaaaatgcttgtctatacctgcagccctagacactccactttaaatttgatagccaaagcaaagttccaactctctgtgatggtgtttgatgtcaaatcttctatcgtcagccttctgatttcccgaaggaaaacaaacaaggaaaacaatatacattcagcatttactctctaaaactccagtctataagggactttactaaatatactacctttgcactgtgcctcaaaagcaaaaaaaaaaagaggcacatctgacagaagaggtgaatcctgaagcatcctttttcactggcatcagtatgtgagtgtgtgggacagagagaaggggcagtctgtggcatctggaagaaactggctctgtccgtgtcttccatagtggaggcatgcaaacatcctgccatttctcccttttaggattttctaagtagacagcttcctcgcagcctcatccctcagctgagacagcacccctgggtttctccagaccctggagatcaggtcacagggatatccccaaatgtacccaagaaacacatctagtaactggattgatcaagagctcacaagagcatggggaaagctctgatgattagtgacctggggcaagtcttcagcttctccgagcctttagtttcctcttctgtaatgtaagaatgacagtaatgttccctttgccgacctcaaagcatcagtgtgagattggcccaagactgaatgaaaagcactttgaacttgtaaggccacattttccttctctggagttagacctccctgttctgagctcctgcgcatgtcctgattatcccgacagagagctgcatgcacgtttcttctctactagtcttggaccctcctaggcaagctcagttacttaataagaattttaaatgataatcataatatggctaataacatctgctttcagagcttctgctccacttcaggcactgcgccaagtgccttagatacattattcccatttctcataatagccctgcaagttagcgtactttttcattctatttaatatatgaataaactctgaggggttaagtaacttgccctgagccacagctagttagttgcagggctgcagacaacatgataggggccacaggagggttggttaacagacattcaattaatagtgatgctatagtcaagggtaggacagtggtactcaaaaagtctggaccaacagtctcagtatcacctgggagcttgtggaaaatgcaatttctgaataagactctagatcagtggttctcaaacttcagtgagcataagagccacctcgagggtgtatttgaacagattgctgggtccctccgccagagtttctgactcagtaggtcagggaaggaacctcctgataatttgcgtttcagactagttcccaggtgatgttgatgctgctgttcccagaaccacactttgaatatcacttgcttagggattcttaatatttttgtgtcacaaacgccttaacagtttggtaatacctgtggatcacctctcagaataatattttacatctcataaaataaaatacaaaaagttacaaataaaatagttttgtccaagcattttttaagttgttgtatagtaatgtgaatttctttttatatattaaataacaaaatctagtgcagtaggtctaataactcccatatttcaaagtagtggtaagtagaggcaggtacaacaaccataaaataataagaaaatatctgatttatactggttacaaaaccacaggtgctgttcataccacagtgacttgttgcctacatttattgtagaatgtgacactaaagccagttagaggttaatgaaaataaagatgccaatattcctccgttatggtagcagcctctaagataaccccagtgattccccacttcctgatattcacaccccttcccttgagagtgggctggacttactgactcacatctaatgaacaggatatagcagaagtgatgatatcacttcagagattaggttataagaagactgtggcatccatcttgacaatgctttctgtattagtctgctcagactgccataacgaagtacctgagactggatgacttaaacaacaaacatttactttctcacagttctggagtctgggaatttaagttcagggtgtcagcattggtcaggttttgtccagggctctctccttggtttgtagacagctccttctcccattgtgttcacatggcctttcctaggtgcacctggatgtagagagatctgtctttcttctcttcttatgggtcactaatcctatcacattaggaccccacccttaagacctcatttaacattaattgcctcctaaaagccttatctccaaagcagtctcagtggagattagggcctcaacatatgaattttgggagatcacaattcagtctataacactctttcctactgtctgtgggatcacttgccccaggggaagacagctgtggtattgtgaggcagccctgagagaggctcacatggtgaggggtcaaggtctatcaacaactgctcttgaaaatggacccaccctccaacctccatttgagcttccagatgagactgcagccctgcctgacagcttgactgcaacctcaagagaaatgctgagccatagataaccagctaaaaaatgcctggattcctgatccatagaaaccatgaaataataaatatttgttttgttatgctgttaagttctggggcaatttagcatggaacaagagagaactagtatactaatgcaagttcatgggcatcttcaagtctatccacacatccttaagattccctgatcatagccattatcttttcacaggttctactctccaaggaacaagggctcttgtgcagatcaatggcaattaaaacagggcccaccttgggaaggagcagtgcatctgtgttgggagcacagctatttgacataggcagggatgagtgatggtggaaagctattggctgctccttgttgctattctcatggattcatgggccttccatggggcactaggtccacttcttatggaaatgccatcctattagatcttaggatgttaccactgaaaagaccctgagacaaaatccagtcaaatcctgaggtccagagacaaagagactttcccaagatgacttaattagtggcaaagctggattgaaaaggagattatcatcacttcagcctaatgcttttttgtatactccagtaatttctacaagaaaatgttttgaaagagattgattctattctgatttcagcctgttttctcttaagtagcatctattctttgtttttcctactgccttagatattgttatttctaacctgcataggtcactgatttaatgtattttacccccttccccaaagctgttattctccgaagtgttgaatctttgaaggtggctaagggactattaaaatgtcagtaaaaattaaataatcctccctacagactgaaaaacataagtcattttctggagtacactgtggtcaaagccttttgtctgttgtagatatcaaaaatatcatcttctgttttaagtctttctctagaaagctccaaaaacacgcatgtgatgttaccagggaatgaacagatctggatgctcccacctatagatggagaaattaaggttcaaaaacgttaagtggcccctcccaaggcatctgttaaatggagtgatctgagcaaagggctctgggctccataaacccctccctgaattatttacctcctaccagtgttaggacaccttctacagtgtctgcaaccagatgcagggccatgacactctacgatttctgtgtcagaatcctctggagagtttttaaaaataaacaggctaaacaaacaaacaagcaagggctccatctccagaacctgatttagaaagtctgggagagagctggacattttttttttctctgcagttgattataatgcctttccctatttagaagtttttgcctttgacacacgtaagttcttgttatcattacccttttaaacatccagtttcttccaaacagggatcaaaacactagctgtcaaaggaaacagctaattccttccaaaaaggaggtatcttaagcaagtgttttagcacagtcccccattagcagggaattctgacccatatcagttgatcatagtggttctttcgcagaagctccctcactcatgtgctacctcatttgtagacgccacaggttggttaaaaaaaaaaaaagcctctgaactgctaatttggatcagtctggatcgaacactcggcaatgcagaggacggatttaaggcagtactaatatagctaggaaaatctccatccacccctgggcattttctgcagaaaatccaaggaccccaagctttgactccctgcctctccagggcatgttgaggctttgtgaaatgtgcttatcagctttgctgcaggatacatcctaccacttcaccttgtgaggcctccttgacaggcacgattatgttgtccatcatctgctcgtaagctcttttaataacttctcacatattacaaaacactttccacccacgcatcctctccaccttgctccttccaatctttctttttctctttctgctaatttatccattaacttaggcccagtttctagtttatgctaactataattggttataacacctctggtaacttgcagttgcctctgaaaatagacagtttcagcttctactgttgtaaacttagggatttaacaatgctgaaccatttatccttctctgagtataccttgcaatttcagcattgttaacttcacacatgttctcaccatttgtaatgccctttcttcttgtcactcttccaccttattttgctactgacaactcctatctttccttcaggactcaatccatttgttttcttctctgagaaacttcccttgaccacccctctccaacaatcaactctatacatgcttgtctcctgagaaatgagagccgtttgagagcacataagtggtgggagccatccttctttgtatccccagtgcctgccatgcagcaggagttaagtatttcttggatgaatgaatgaatggatccagtggtcacacttagtggcccatatagaaaacccgttgcatgatcgttgggtagctatccagcacagacattccatgtaccaataaacatggagttttgagtatttagttgatgaattagtttacttacacttaatcatcccaggtgtagcttcatgccaagccatagatagttgaaaaagtttaacccagataagctgcagctttttaggtatcacagaaggtataactatagtcttatccagcaatggggccagttttataggtgtgcagtcaaacagaactccttgcttagaagggccctgtgtttcacttagtgctctcttctggcttgtgttgagtgtcttaatactgtttaaacaagagtccctgtatttttattttgcatgggagcccacaatcatgttgttgctcctacccagcagagctacagccagcccaattgggaagtcctcaacagatttttggtgcagtcatcagggtctcctggactctgtgactgatgttaccttctgtgttttttgacttcaaaaaaccgaggggctactgactgaccccaggagctggtattctgcccatgggaatgtgccagttttagtcatcacccaatgaagaacttttaaaaggcacttaaaacagaagtaattagggagtctatttaaaattaattgccaactgaaaaagtaattgctaattccatgggcctcttcatggcaacttcctgttttatttcatattatccacaggcatatttcaaacagaggaaaaaggagccattaatttaagctgtttcattgtagtgggattttatttgccttccacagagaatgagagaagaattttaggctagccattttgtttgcttaatttaagtatgaaaatcatttttaaggctgggtgtggtggctcacccctgtaatcccaacactttgggaggctgaggtgggtggatcacctgaggtcaggagtttgagaccagcctggccaacatagtgaaaccccatctctactaaaaatacaaaaattagccgggcatggtggtgtgtgcctgtaatcccagctactccggaggctgaggcaggagaaacgcttgaacccaggaggcagaggtttcagtgagctgagatcacaccactgcactccagcctgggtgacagagtgagactctgtctcaaaaaaaagaaagaaagaaagaaaatcatttttaaatcacatttctttaaataactttataatgagaccttgacaaaagtgattttctaagtaaagccagtgtctttctgaagacaaactataatggagaatagaaatatccagaaaaagtagcctatacaatatgtatcttttctgcattttcgagtggtatggatgttgacaattaaactggcctgcaaaataaattgagtatttgattgcactccaaaattgatattaaagaattatttctcatgtacataatttttataatagttcttttatttattacaaacatagtgtgtgtttacaaacatgctcttaacctagaagggtaaacaaaaaagaaaacaagtcatttttaaccatggttaccactttgatagaaatcccttctgccttttttttttccacaaaactaggctcataaactagatattattttgtaacttgcttttttgatgacctgcaactatatttctatgccattatatattcttttacatctttattgtgacattgtacatagtattctatatacatcatatgaccgtgggatgatggattcaaccagtcctcattgttggaaaattgggtaagtaccagttttttttcacaaatgcaaacatctatttagcagaagctttgtgtatgtatatgaatgttttatatacattgttaaatattaaaaaactaaatgttccttaataaaagaaagcagttttttccacattgtcctttttcaaggttatttaattctttcagcacatgcatttgcaatggacatatatgtgtactgtgtgcatcacctgcatatgttatgttagcaggaacgtatacttgctttggtcccctagttgtttcttctgcggttcaacattcattgctctctatgtgccagggtctgtgctcagtattggggttcaaagataataagacacagttcctttacctaaaaggtacattaatctactgggagaggggatatgcatataactaatgataatgcaaaaaatagaggcaaaaataacattaagggaacacagaggaggaaataactgaggaaattaaggaagctgttccagaggagaccctgcaaagcatatgtaggattttgacaagagaaagaggtaagagaacattcggagaagagggcaaagcacaaatgcagaccagggaaggagatgtgtggggggccttcaggcagcactggggtagacagtacaggatggaagtggagctggaaatgacactggaaaggggggttgggaccagattgcaaaggactagaatgccattctcaaaagtttttgcttctgtttgtaggaagttggaagtcagttactgtctgagaagctggggcaagcctggatccagaattttagaaacttaacactggttaagtttagaggacagggtatcaactctgctgcagtttgcaattaggagtcccttaaggcagtctaggcaagagagaatgagagcctcacctggccacaagacattcaagagatatctcagaggcagaatcaaaacaacccagcattccaatttatgtgagagaggaagttagaaggtgacatgcagaaaagtaaacctctaaactactatgtccagttcaaataattcttcaccaagttgctaagcttccagagttagggatcatgtctttgggactccacttactctcaagtcaatgcctagagtagtcaagcagacaggtggcacttggcaagtccttattaaatggaagtgtcatagcctgtgtctcctgcaagaaagacagaaaccttccacttctcaaaagaaacaaaacactgtcttttaagaataaggccatggcaaaggaatgcagtgacatagtcaagaacccaagctttgttgatcatttttcttcaaaggataattcttacagtttaaataagagcatgagttaatcaccaagcctgggtcataaagactgaaatctaaacatacttgtggtatttcaagcactgatgaatacgtattaataaagccaggagaaagtgttggctcaaaaccaacttattagatagcctgcagcatgggattgagaaactaactgcaacaggacaagaaggaacctaaacagggattgaaatgttctagatcttgatgagggcagtggatccatgaaggtagacatttgtcagaatgtatgaggtagagacttaaaatgtactaatgttatgatatgtgattatgacacctcaataaagttaatataaaaattagagattagaacccacattaaaagtgttactaaaatatgattgttgaaattgcttcacattatttcttcccaagatacttgctcctttgaagtttaaatccctttgtaaaaaccagtttactgcaacttagtgcaacccacattttttgtgtgccacctgcaggctagatcccgtgcaggcaatgagagacataggagtgaatgtcagagacaagaccctgcagagaagtcagggcagctgccagcacaagacaccaaaccaggcagaacatagctctttctggttccttaagtttagggatcctgatcttaggaggaggagagaaaatactttttaaagaccagatcaaaaacagctcagtgtatatgctgtgttggtgactcttgccatttggtttcagtgctgattttaacacctttagcaatctcagatttaaaactaagttattctggcacctggtaggttagatccccagggatgatcctctcactgggggttatttctcactgaagtgtaaggacctgtataactgtaagctgtatgtgtgaattctgagcatttaaccgaatggtatgaatctgctgtgttaacttttccttccatcctgaagattctaatagcttgtcatgatccagctgaatgtggatttttcctttgttgattctggcccacttaggcccaggtccagcaacttaatgagcagttgcagggagcatccactggaaatagaaatgaaaccaactccctttatttaacttggaaaggagtcatagtgctggaaaataatcttagacctcaactgaccagggttctgccactctagaaatgcagacccagggaaacgaagtgacttgcccaaggacacttgtgtagtttgggcaggctgtggcctagaggtaaagtcccctgtcttccagtactagaccacattgccttcattttaatgcattttaaactgacttttatgtacagtcccacgtccaaaaagtccaactttccatttggcccattgagaggaacatggactccatttataaaccttccgagaggcagaatatagatgtctttcacaacccattcctgaatttcacagccttccctactaggaatttgtatgtgctattttctttctcctatcccactccacaaattgccactacctattactttctttgagcaaaagggattttaatcattctccttttccttgatttcaattctctgaaggcctgtctgctccatttgccacagataacatgcagaaacctcacttgcaatgaaagtcacacttctcttggtaacctggcatttcagcatttaaagaagctaagtatctccatcctcattaaattaggctcaaattggagaagagaattacatagttaaaaacacagaggcaaaatgatggattaatgttataccttaatgtaacacatcatgacatgcagtaggagcattagaccaattagcaagcaagtcttctgcttgggttcatcatttctgctgtgtatgtagaaagggatagcaatttgaaggatggcatttatcaaatccctttggataaaaagtgtccactttagcaacatgacctgcattccttataaagatggcaccccattgcccaggaacatggcaaagacccaaatgctatcccaaaaatactatttccaaattggcgactatgcttctgactttatttctaaaacttattgaaatccattgcaattgtgtctaaattggaggtttaatatgctacaaaaatatatcctgctcttttcttgagaggtagcaaatcctaagtgatgccatttagcaggttttttgtcctgggtctcccccacccctttctggttatgcttccttatcagtctgattggtaacagaaagaagagaggaacaatatatcttccagttcctcctggtgtgaatgcccaagatattgtcagaaggaaaatgtatgaggaggtggggggagtgtgggtcagcaacttgcagggggaagggatggttttctgctatggtaaagcagaaaaaccctgtcatggagttaaaattaacagaatctgcccggaggggagccatggtctttgtgtggctgattaatgtcagtcctgtaaacgcagcactccaacaacagggctagtcagctgagcaggaagcttggagaatgcagaatctcctgcctaggggatcagagcccagatgagtgcctctaaacagggctgaagagaaggctgcaggcctggaacagaggtgatagaattagatttcagctttgtgtctcagtgaaggaaacacaggcatccattaaaagcaccttcccttctggccttgctgctgcggagagcggcagcgtgcaaatccagcccctacctctcctcactcatctgttcacagcactgtggccttcagaacagtgtgtcagaaattaccttcttccataactgatcttcaggcctgaaaaggaaaaatttccaagcatagatctcctgaaatccctaaggagattgggcaaagagcctaaggaaaacaggactttgcatgttgttcctcatgcctacctaaaaatgctggttgcaccaggcaagtccttggttaatgcatcagtgaaatggattttgtagttcccagcacatgcactaatggaagtccctgcatgaatttcatgcctgcacttcttattggcaagagcagcgtaccatatgctggaggtggaagttaattctgtagggaatgtgtgtgatttgaaaacctgtgtgctgtatttatgtcaatcgctgatgtgtttccataaatgcatttttgtgacttggagaggcatcctgagaccactgaatcagtgaaggcagcttccggggcacacaacctattctgacacccagacagggccattgttttccaggtgcaagcttgatcacctatgcaacccgtgtgtgtattcacctcaggaattcatgttgaagaatttaatcttgcagccactccaacaatagccagaaagcacccctaaatgtctgctctgaagccttatttcaaggagacagcaagagaagaggaaagctttcttatttttaatcccagcatcaataaaatcacaggttgatgtgtatacatcacagggcagttgttttgaaaaagaaataaaagtaaatgatgaaactttggaaaaaatggactctctggaatggaaccaagaacaggctctcagtgttgaccttttggttaaagccacataatgcaatttatgtcatccctcaagatatatgattttattggtttgctgggaacttgggcttaagggaaattgtacattgggaaagtaaaatgtttagctcttattattgccaaatgaggtgttataataagaaaaaaaaaatgtctaagccctcccctctaagagcttatattctatggttccacaattctcaaaagacattttcagatggttgtcataactaaagacctctgactaatgaccgtcttctttaagggtatttaggatcagaatggtgctttttcagcccacaaagctgttacaatttacttcttataaatcctaacaaacaactaaagtgaacatgaggtttctaaactgttttgaagtgctgaaatcctctaatgaaaccagttaaatcaatattcagaagtagaagtcaatccaaccgttattcaataattaattggttgttaatagacatttcctagtttgtatgttttagctttagtacatagtaacataaaatggtattttggtaactaggtacatttcttgaaatcgtagagcaggagagcacccttggactagatcctctcccttccttgatggagtattccaggctcactgacccttagatttctttttttccctctataatcccttatgacctcattcatttgcatggctttgcatgacatctgtacaccaatgacactcaaatttatggctccagcttggccctctcctctgaactgcagcctcttctatctaacttcctgcttgacatctgcacttgaatatcaaatgcacatctcacacttaatctgtccagaatagggcttctgcattcaaaacctagtctttctgcagccctccccatctcagctaatgacaaccccctctttccaattgctcaggccaaaacctaagggtcattctagaagcctctgtttctctcacatcctgtatcctgccagctccacaatcagaaaacactctcgccacctccaagttcagaatacatccaggaacccttcatttctcaccacctgggtgcttagaatagatgtggaacctgaccccttctcaccacttccgacaccatctgccttgttcaggccgccaagatcacgtgcttatgttgctgtaggaggctgctgactggtctccctccttcctctctggctgcccttccatctgttcaggagcagaagccagagggatcctgttaaaatctacatcacatctcatgactcccatctcacagctcaccagtggcttccccctcaccaccactacagccccactataatgtaaaatctcttcaagaaatgttggacttgcccattgctagaccctcaagcccctagaaagtgcctggtagattctaaatacatctgtgttgaagtaattaattaattaattggttttggttggtttctatttctctttctgtgccacatctttacccctgcatctattagcctcacagtttttcttaaagatttgtggggggcgagttgtatattaagaatatccaactatttctgatatttgttgccagtattttcccagtttctttgccttttaattccattgtcttttttttcccataaactgaaatttacatttttgtagagccacagctgtctgtttctgtaataactatttttcttgttgtggcccttcaaaagtctgcaaagctgtaacattctagtgcagatcatctggccatgttcttgcccactcattttcctgtgtctctcccacaggcatcaataggaaggtcgtgtactccctggcagactcagctggtggggtcttctccattgacagctcatctggcatcatcatcctggagcagccactggaccgtgagcagcagtcttcgtacaacatcagcgtgcgggccactgaccagagtcctggacagtccctgtcctctctcactactgtcaccatcaccgttctggacattaatgacaacccccctgtgtttgagaggagggactacctggtgacggtgcctgaggacacctcccctggcacccaagtccttgctgtttttgccaccagcaaagatattggcacaaatgctgagatcacttatctcatccggtctgggaacgaacaagggaaatttaagatcaaccccaagacaggtgggtaaatagcactgtacttagaatacagagcttcagcttggcacggtggctcacacctgtaaacctagcactttgggaggctgaggcaagaagatcgagtgagtccaggagttcaggactagcctggacaacagagtgagaccctgtctctacaaaaatttaaaaaaatatattagccaagcatggtggtatgcacctgtggtccctactgcttgggacgttgagatgggagaattacttgagcccaggagctagaggctctagtgagcaacattcctgccattgcactgcagcctgggcagcaggggaagactgtgtccaaaaaaaataataatagtaagaatgcaggacttcactatatcctgcttctcccgaaaacactctgccagcccttcttggtggactctttttcctcctcctacctccttcacagaggaaacaaatctgttagcagggcccacattcagaccacagagtgccctccagcttctaaagatggctcctgctaaattttaagctccttgttgtgggcttacttagcaaatatctgacccccaggttggctccaggatttctaggtgggagggctcaggggcagcaatgtggtttctcaatggagagaggaaatagtatttgtattccaagaacaagagtttgtttgattttctctcttttctgtttgatgttgttgggttttttaaacttaagtcatatgtgcacatgttggaaaatgttcatggggatgagcctccgtgtgcaactgtccacacttggactaccactccttcatcacatgcacaggcagacactgataagtgatctgcatggtgatatgcagccttctcaacccagcaccccaagtagactccatcggtgagctggaactggtgctctgtttgaacccagttcacaattcatggtcagaacactcatttctcaccacatccttttccaactctggggaacatgtagcatcacctaggaaataaaaaggtgcttcgaaataaagcaacagaataagagagaaccctggggctttctcttcaccagcgagttaataagtattagacgtgcttcaggcaaataaaggtcgtaattctagaaaacaagcttggatgttctttgaagactaaacatactcatccttgtattttcatagactgtatggatttctatcccaaagccctttggtgaatattctcacttatttcccaattcccctatgaatagtcaaggaagttcccattttgcagagaacaaaggtgagtctctcaccttccagcctttgcacatagttccctcatcactcaaggagtatgcacctgttgaacaaggtggcaaaggaggtccattttcctttgggtagtccagtaaatataaacaagaaatcattataattagcaatgtttatttaacatggcaaatataccaggctcttactaagtacaaaacagaatttcagagaagttaaataattaccgcagtgtccactgttaataagtggtttatccaacattcgaactcagatctttctgactctagaatgcgtattctaatataatataatataacactgctatactgtagggataccaaaaatgtaagaaatacagtcctggcccgtggtaagtattggaaggtgaaaatattgatggaggaattgcatcacagtctctcctggcagtaactgtttattaaggtcattatctcaaataaaatgtatgggggtttccctcatttaaatatgtgttgtccctagcctgtctagttatgaccattgtatataaacaccatggggaaatggctaagtactatttaaatttagcactagttagcaagactgggatgcaaaataagcactaggggtggtaagttccagaaaacttaattatggggagaaagaggctcttgttacaggtatgatttctgtgttttgccttaggtagaaggagcctattggcagtcttagcaactagagaagttgcctgtctggaaatgtgaatggtcatgaccttctcaccagtcctcatgattgtttactaggtgggaggaaaataaatgcccttgagaagtgttctgcaggcaatacaatgactgcagaatgcaggattgggttacctcccaagaaagggctaggatgggaaggatatagcaccaacacccagctagctgctttcacatgttctacttatttaagcaattctgtgacatggacattatcatctctcttctgtagttgtgggcactaaactcaatatgtggctgctgggctgtttgatttccaggtagttccttttctattctgtcactataccttgagatttctgagatctttgccctctttgtgccacaattgttttagataagtgcattttaacttggcaaggcacctttgtggttaattcaattcagtgaagtctgcaagtatttacttgctgacaagaatgaggtcataccatcacatccccaaatctcagctcattcttggtcttcctctgtccacctgaggaatcagaagacacctatcagggatgcttgtttctgttcctactcgttagttgtgtgagagtgaagatgccagagattttcaagctgcctgagagatgttcataaactgttacagaaacatgtaaagacttttcatttcttcagtgttatgtttgatggatagctatgctctcactgacagcattaatcagacgtctgtaatactttcagtaaggcattaaataaacaaattcctgaatgtttaaattcttggctggagaggatgttagaaatattaccatgattatagaattgctgaccagtgttttttcctaatgaaatataaagctccccatttttcttcaaagggggtatttctgtctctgaagtcctggactatgaattatgcaaaaggttttacctggtagtggaagccaaagatgggggcaccccagctctcagcgctgtggccactgtcaacatcaacctcacagatgttaatgacaaccctcccaagttcagccaagacgtctacagtgcggttatcagtgaagacgccttggtgggagactctgtcattttggtaggtacctggggttggggatggttctagatgtttgggactagtcatccacaataaagtgaagaagaaagcaaagtccgtcttgggttttcttcacacttccccctttcagtgtccatttgtccccaagaataggagccatctttctatggctccttctgtaatttgtatattaggaagagtctgatagattaatttatatcaaggtgttagtgattgataatcacttatttcccaggagcatatcttttttgagaaaataaaacagaccatgggatgaatttttaatgatggccccctatgtagatgtgaacttatatgacaggttattaggtggctaggaggaatatattctttttttcttttttttgagatctgttgcacagcatgatgaatatagttaatagtggtatattgtacatttcaaaacggctaagagtaagtttcaaatgttcttaccacaaaaaatgctaggtttttgagatggttcatgtgttaattagcttgatttaattattccacattgtattcataaatcataacatcactttgtaccccataaatatatgcaactatgatttgtcaatttacaatttaaaattattagattgctgaggatcaaataaaatccctgtccccctttccccctacacacacagacacacagagttgggcagctacaatttggagcaaacctaagattgactagccactcttaaaggagacttttccagggggaactctgtctaacagtaagaacaagccatgtatcctgagaacacagattctgttagaccgcaaattacattttggaacaaagagtcccctcctcaccatccttccccatcccttggctggcaggtcccttccatccaagtcatctcattgcaggatgagggtggagccgctctctgctggaggacagtacatttcttatacatcagaagtgcacccctcaggcccactctgcttcctggaaagtacatgactgtttccatacatataaatttcaacatcatcaacctggagcaatagacagaggggcggtatatttgctgtgtgggaaggggaactttcttggcttccttaacatggaaatgcataggcctagagaatccctcactcaatggcagagaccattacttgcaggattgggaagaaatcaaagcgttcctgtccattagctttgggctctaaccatactgtctcaaaccctgaggaaaatcaggcctaacaggcatcaggctgtgggcaggtaaaaaattaacataaaaataaaatggcagctgcgggcctggtgccaccctccttcagctgattaatcatctcttctgctgggggcgtggtcactaacattagagagcagagctcccgagaaaactgtcacagctgcacccatttaaacagacctgggaccctaagaatcaacctttgctgccttatgtcatgtcttttctttgttttgcttgttttccatgaagctaatagcagaagatgtagacagccagcccaacggacagattcatttttccattgtgaatggagatcgggacaatgaatttactgtagatcctgtcttgggacttgtgaaagttaagaagaaattggaccgggaacgggtaagctagtttaggacagtttccttcccatccacatccaccactttcctagaatcaggggcacaagctccacgggtgtaaataggaaagttctccattctaagtaatgagagtaaataaggatgggctaaaatgcagcatgaaatattagggttagacctttgatagaattttctacctataatagatgctggttatggaggttttaaagaaaagataaatatgtatctttctaggtggtttgaattttagcccttcctagagcaaagggacagaaaaatactttcagggtgttgggaccctgtgatcctgactttatgagcaactttagccctcggtgagcaggtacaaaaagatcacctgaaggcatctaggtcagaaaaaatagtccaaaaaatttctctgtccaaggttaagtgaagtttctaaacattgtctttcttgaccaaaaaatattcatcttcgaagggaaattaaatatggaaaaggatgacatggcaatgatgctaaaaagcagatagactctactgggtgatacatgctcataaccccagaaatattaacattgataaataagacagatcagcagtgacaactattgcactgagcaaaggcccagagcctgggtactaaccagggtggttttgtcccccagggacgtttggcaacgtttggagacatttttggctgtcataactgggcagggggtgatactgcctcccacttgacagaagtcagggttgctgttaaacatcctaaaatgcacaggtcagcccccaacaacaaagaattatccagacccaaatgtcagtggtgccaagaatcacccggtctggaaaatcaaactaaagatggttgctctttaacaaagcacagcctgtagctccagttcctctgtgtgtgcacagaaggaaggaagcgctacacctctttactgtcacctctttgtaccttggcaggtgtctggatactctctgcttgtccaggccgtagacagtggcattcctgcaatgtcatcaactgcaactgtcaacattgatatttctgatgtgaatgacaacagcccggtgtttacacctgccaactatactgctgtgattcaggtgagaaaatcttgcctgccaagcacttgtccctttgcattcagctttcttcctctgctgtggtttactcattgtggtttattgctactattacttaatgtcatctcatcccttcatagggcaggtatgaaaaagaacctagttcttctaccacagatgattaataaatgtgagtaagagctattgaggggtggatttttttcaactgtcaggtgctttatgcactctgtctctccccacaacaacactgtgaagagggatggtggattggtccccactttataatggaaagagctaaggatctgtgaggttaagtaattcaccaaagatcatgcagctggtaagtggcagagtcaggatttgaacttggggctgtcttctgcaaaagaattctctttccccagtggcaggctacctttaagcaactttatgctattctggcagatgacagagattgatacgcattgtctcatcagtcaaagacagattgggcatcaggatagagctggtactcattaaaattaatcttccataagcaatttgtttaacactttaaatccacctgctctttaaaatcagactgcaggatagagtaacttactgctggtattctgctataagagagagtgactcttcttcccatctattttttattccacgggcacagtgctaggtactgagcgtcctctacttctcagtatttctaggagctgaaagcccaactttaggaggatcaggaaatctagcccaggaaaactgtcagtgtagaggacttagagaagacagagtgatatgcatgacttggagggccacaggtattctagagaattagttcttgcatgatccagtttggcctcagaatcaccccaaaggagtcccagggctttgtgggtggaaggtgaaatgtgagtgggccagctcttgagggtcccctttggaataacattcaagaatttgagcctgaccatccatagctggcctcctcagaccccagggccactgagctgtccagcaatcagactgggaggcagccttgaaggaagcagctgtctgctggttcccacccctttgtcagcgaaatctgattccttccctggtggtgttttggttttctcctcctctctgatgctttttccagcagctctgcattctcaccacactcctgcttccccagagcttcgcccagagtccacaccttcctccatttctctttctctcagctcactcttctccatgactgttgctcacaagggtgctctctgccctcatggcctctgtttgctaaccccaaaacaaagtgggtttctcctactcaacattcagttttatgacacacatcaatcagcttgacagactgttttcaaatgcgcaacaggaggtcaacagtgaaagcacggagaggctcagcccatgagtgatggtggggcccctatccgcagggcaggcatgtctatgttaccttatacccttcttctcagatgctgaccctgagggccacattgtctctctccctctcttctatgcaggaagcggcctttagagagtaagcaaacaaatcagtcagtgtgaaatagtaaatatatgtggggctatggtggtcccacgactgattccagagggagacactgtctagtttttgatgaccaaaaggacacttgtgaaaaggagcaaaataagaggtctatgcagtccttttctctttcttcttcaaaaaatatgcctcctttttcccaaccctgaatgacgttcttatttccacacatggttttcataagactaattcaacacataaaacttgactgggcctgccctccaaactgtagtgtatcatcgtctccatctctgcaacccaaactggtttaatccttaggtcgatggcatcaggaggcctgagctgatacaactgatttcaggcccaagctgtggtattgctgaagtctaaacagagtaggggaaaggacagcaatacctgagctacagaggatttaatttgccgttttcaacgtgaggatgacctttgacccaagaaggagctttgcattcccatttggggaaaaaagcagagaagttctgcaaaataatgcttatgtaatagaatcaggacttccaagaattctgacaaaattaaggattcctgttctgttcattgtcaaatggaggaatgttttaccccgattcgcttccctaaaggaacatggcaaaaccgtgttctagagaattaggtaaggtataaagccccattttccaccaggaatatgcctttgtatattgactaggaagttgccaggatgtccccccaaaaaatctaatgctgtgacattgtatctagtgttgggcctcagcataattgtgttgtgacatgtgtgtgtgaggaagtgcctccccatcccagtggagctcttcaggtcagctcgggcattgccagctaacccaggacaaggtgcacccagcaccatgctcggaacctgtaaacccaggcagctccaagtccttgtgttcacaccagtagaggattgtcccataggtggttgtgggaagcagccaaagataaggaacatgacacttacagacaccaacatgttttcagaagacaaggtaatgtcacagggaatcccttctgctgaaagccctgttttctagctcagcactctcagcctgaaatgatggtatttttgatttgttttgttttgttttaatgaatgtgaagagaagtgtaatttttatcttcatttttactatatactcttttatgcaggaaaataagccagtgggcaccagcatcttgcagctggtggtgacagacagagactcctttcacaatgggcctcccttttcattctctattttgtcgggaaatgaagaggaggagtttgtgttggaccctcatgggatcttgcggtcggctgtggtcttccagcacacagagtctctggaatacgtgttgtgtgtccaggtatggcatcgcactctgtctccgtcgtgctgtctttctttctcatgcttgtttctgtcccctttggtggatttttttctttgctgagtaagtcaacataattcattaccatgcgggaatgttcccccttttaatctcaaattcaatttcacaccagtaaaagctgcctctgtgtgtgaaactgaacaggaaggaagggaagcatcattgttcaggaaggacattcctgtagagtatgcccaacagatggtcactgggcttaaatctgcattctaaaaactcctgctgctttatgctattgcccatcacattaccccacttgggacagctaccaatccctgtcataaggggacttagccatttcatgcctctgcttgataggccttccccagtgaggcaggaggggaccaaggactcagctggcagtggcccccagcatgtcagttcctcatgttcattggcctgtgtgacgtaaaatgggccaaagaggcaaacgtggcaggtatgcagagtatagaaggagcaggaaatgagagggcctccgaaagttcccatgtatgatttctgcaaataccaagatttggatcccatcagggaaactgagtgactttttctatccactgttgcttacagagggcaacctagactcattattaatggtgacaataatagcaatagtaattattggtattggtatagcattggcttaaatatacattgtctctttggataaattacaccttactttactccatgaaaccttctaaattaatgactgccagctccaagcacatcaatgaactcttcaattgccatctgctcctccaacaatattgtgtaaataattttatatcacagggtagtactcaaggcaagaagagcttttcagtgccttctcacagaaactaggacagtttgcctatcctctccggatatggagcagatttcacatctcaggttttagaatctttgtaaaaggctccctcccccagtcccttgtattaaactaccactgagtcctgtgttttcttcctttcttcagtcacattcccattgccactgcctcactgtattctgcacagccccttcatcatgctactgtggcaggagcctcctgggtgcttcctctggcttcagcttcattctcttctgacccaactcttcacccctcccatattaatcattccacttagagtacatcatttcccttagtcagggaccagcaaactacagcccttagaccaaatcctgccctcagcctgtttttagcattgaagttttactggcacacagcctccttcattcaggtatgctccgtgactgcttccttgcataggacagcctggcatggttgtgataaaggctgtaaaacccacaaagctgaaaatatttattatccagtgctttacagaaaatgattgctgatcactgccataaagtaaaactatctgttggttttctagtgtttgaaaacttaggccctgcaggctgaattctgccccagactttcagattttgaatttcaggaccttttgacaggcagcactctccagtccttctctggccacaggtccattcctctctcaccttatacccagcagcttcatgcctttctttcatctttctggcctctgacatgtgaacgggcaacctctggcctataaagtctaaacttgtcactctcctttgaagcactccacagtttgacttcaagttcagtctcatctgctaaagttatatccttctccatgaattttacattccagcatctcttgttcacatcatccatcaaataaagcatgtgatgatggcaataataaaaataacaacagatggacacagtggctcacacctgtaatcccagtactttggtaggccaaggcaggaggattgcttgtgctcaagagttcaagaccagccttggcaacatagtgaggcctcatctctacaaaaacaaaaacaaaaaaaaagtagcctggtgtggtggtgcacacctatattcccagctactcaggaggctgaggtgggaggatcacttgagctcaggaggttgaggctgcagtgagctgtgattgtaccaccactgcactgcagcctaggtggcaggacgagaccatgcctctaaataaacaaaacaaataaacaaataaaaataacaatcacatgaaacatcaagtactaagtgtgtctatggattagccttgggtttagtgctttgcactgactctcttttaatccccacaatagaaggaccctgtgaagttgatgctgctattttactcatattaaaaatacaaaaactgaggcttagagaagttaactaacatactcaaagccagatatgtagtgggtgacagagacaagattcaaactcaggtctgtgtgatgcccaggcaccggctctttcactggcttccacatacaaggacacatctctccccagatcccacctggtctgcagggttcactgcagctccacatcttcagatacctgctccataaacccagcccatgggaatctgcccttctcctgaagctctgcactactgaatacctccaccttgcatgcgatgggtgttcagtaaagacctgttgccagagtggatgttctgttcattcttacacatggaaggaagagaaaaagggtttttatcaagctacttagcttttcttttcagtgtattatattttatttgaaaccttaccatgatataattcccacttaaactatgtcatttcttaaatatgcagaaaggtgctatctgggtccagtcaaaaggaaataatccaacagaaaacagaaatttctcctccaagtggaaagaccactttatgaggtttcccctgtggttgctgcatacaattaaaacaagctcagcctgttgtgggcatgttgagtcttgtagccctctgtcctccttctctcttcaccccagccggctttattgtgttgatacattttattgtccataacagagtgtacatatggggatagaaggtgataaatcactcctcttacttaaacgcacatcctcagcatttttcagaatagtggcaaggaatgaaggaagaagcaaacgtaaaggtacagacgtcttctatctgcgggtttttaaaaacttactatgattagttttcttcctttgttgccttttcacctcttggttgttttaggcaaaggattcaggcaaaccccagcaagtttctcacacttacatccgcgtgcgagtcattgaggaaagcacccacaagcccacagccattcccctggaaattttcattgtcaccatggaggatgactttcctggtggggtcattgggaagattcatgccacagatcaagacatgtatgatgtgctcacatttgccctgaaatcggagcagaaaagcttatttaaagtgaacagtcacgatgggaaaatcatcgccctgggaggcctggacagcggcaagtatgtcctgaatgtgtctgtgagtgatggtcgcttccaggtacccattgatgtggtcgtgcatgtggagcagttggtgcatgagatgctgcagaacactgtcaccatccgctttgaaaatgtgtcccctgaggacttcgtggggctgcacatgcatgggttccggcgcaccctgcggaatgcagtcctcacccagaagcaggacagcctgcgcatcatcagcatccagcccgtggcaggcaccaaccaactggacatgctgtttgcggtggagatgcacagcagcgagttctacaagccagcctacctgatccagaagctgtccaatgctagaagacacctggagaatatcatgcgcatctcagccatcttggagaagaactgctcagggctggactgtcaggaacagcattgtgagcaaggcttgtcactcgattcccacgcgctcatgacctacagcacggctcgcatcagctttgtgtgtccgcgtttctacaggaacgtgcgttgcacctgcaatggtgagtgcagttttgagtgttccctctcaactcctgagattgtaggagtagaatgagttaccattccagcatgcctgcattcaatcattcgttcaactaaatattaaatgatcaattactgtgtgcccaaaagccatgatagatgctggggctgcaggaggtacagtcccatgtagctgtgcctaagtgagcagcacagacagacaaacaggcgagcctattttatacatattgtcaagaaacatacaaagtcctgtggaggacccagccgatagggatttccccaaagggagtatcctctaggtagagataagggtcaagtaggaatcagggtaggggagggagagccttctaggcaaggggcagcttgcatgaggaaggcttaggggcataagaggaacctacactggggatggaaagagctttcctctggctgcaataagcagggctgggatgtgaaataaggcttgagagcaggcccagtcatcacacaagggccattagccaagatgaagagtttagaaattatcccaaggcagtgagagccattggctgatgagaagcgaagaaatggcaggatcagatctgtctttcacagagggtgtgctgattgcagaggggaatggattagaggaggccaggccagaggcagggaaacaagttaggaagctgttgccaagggtaagggcagttcgatttgcttcagtgagaaacagaggccagatgtccaggagcacagtcaagggatggattcagccctcagagtggcagggaaggaatggttcatgtttgttgatgtaactggagtcactgaactttgacctttactagtcaaagccatagctgcacagagtcacatgcccgtagtgatcgatgagaagcattgccctctctctcttttcctccgtctgacatgtggagccataaattcactgcccccttctaagaaaattgcagccagagtttttctagccagtgtgaatttggtccaaagggaccatggccagagggaggccatttgtaaaacatcctttaggtaattggggacaggcagggccccggcctcttcccttgcagaaagttcttggttgcagtttggagaatgagctcatcacagggaggccctaggggtcataactccctctgagagacactttgacaggctccaagcagcccatcagtgtgccagctgctctctgtggtatccagtgaattctgtttgtgattgcatcaggtagaagcagggatgtccagacttgtttaatatgtaaattagctgcaaagtaactcaaagcatgcatgctaggtgaaatgcatttctggcagatgtcaccaacatgcagaatttatgaatgccagctgtctgggccttatctagatttcctttgttgacaaactgatacaccaaagctctgctagggtctgtatgcggtgattcacaccagggttcaaaacgggttcaggacaggacagggtagaccctgaagacgaaactataccagctaattaatccttgtactctgagaactcatttatttctgaaaaaaatctgtgaaggcagcaatgtcctaggcactaaagattcaaagcaaaaaagatacagttactgcccttaggagctgacaattgtaaagtcagcttgcaagcacctacttgctgtaacagtgctacagtaaatgctagggcatggaagggacagaatcccttctatggtcaaaggaaagctgtctgcagtatctgtacacagagaccaccaatgtgctaggtcttcagggatgacttcatcaagaagagactggggtgggagcagggagcagactgaataattctttaaaagaaggatttagaggagtggttttgatggagatagaggggttgctcttgattttacataagacactaatgtcttaaatgcaatatgtttcaaagtgatgttttggccctgttctctagtctccataaacctttctactcccagtaaatttagaatgccagaaggttttgtgagtcaggccccagccatcccaagaggaggccttctgggtttgaaaagccagcatttgctcaagaagagctttgtgcagagtcaggccaagctctcagccttttctcaccttcaagtcactcttataattaagctataaaatgaaattctagattttagtggtaaaggagctccaaaggtcatctagcccagccctatcttcagcaggtgatacatgataatctttgttttatagatgtggtagctttgtgccttgcccagggccatacagctgatgagagtagcatactgattcaagaaagggccctcttgggcccctactttattatctgcatcttaagaacagggactcttcctttttaaatgtgaatcataacctcagtgctatgtactgtataagaatcctcaaatatagtcatgcatggcataacaacgtttcatcaacaagggaccatgtatacagtggtagtcccatacgattataataccatatttttattatgccttttctatgtttagatttgtttagatataaaaatacttaccattgtgttacaattgcttacagtgttcagtacagtagcatgctgtacaagcctgtagcctaggagccataggctgtaccatatagcctgggtgcatagtaggctgtgctatctaggtttgtgtaagcgcactctatgatgtttgcacaatgacgaaatagcccaacgatgcatttcacagaatatatccccattattaagcaattcatgaccgtaatgtgattttcctagcagaatgatcgccagcctcacaatacaatcccagtaaggcagaagttctctcagactcctgtgtgcatggggcttactaaatgcccattgctgagccccacacttagatatggacagttggggtggagcctaggattctacacatgtagcctggatgactctaatgttactggtcaggaaaccaaactttgagaaatcacacagcaagataaagaggaaagcgtttcctccaggggcaggagcaggctctttgttttaatagcaatagctttctcacttctagaattatctttcaaataaaaatacaaccatgaattgttaaggtaagcgttaggcatttttaggcattttcttgtttattggaaaggaaaaataattgaattcaataaatgcccctccccccaaacacacacacacacacacacacagacgtgcacccacaggtgcacacactcacatgcaattagtattggctgctcttctgtttactctaggaggtcggcagattcattagatggagtttcccaccacttggtggaataattagcatgataaatagaggtaactgtccactctgggctgtgtagtaatgtatagacaaatttggcctcaatattctatcctcctcccaacttccagctcatctttttctcatacagagagtttttggtccaattatcatcattagcatcttgaaccaaaatgctgagttgttttaacaaaatgaaagcagacttgaattttggtgccaaataagcttattagactccagctacaaacaagcatcgtgtctgaacaaacttcaagagatacaaaggtctgatgttgtgaggtggttcctggtgaacttcagaggtgcaatgaacattatcacttcagtaagaaagactgacaccaacttaaattaattgaggatgatagatgtcctcgagcccgtataggagatgtgcaagagaaaggggtgtcacggcagcctatggggccttgttgattgtccatttttgaaaaattgcattcaaaaatctaatacataaatatatcaaaaaggacacacttgtccagttggatggactgccagtgagaccatcagagtttacaaccagtgtgtttatgggtgtggtggaagaagtggatgcctgatttgtcaagtctttattaagaaatgtaatatagaatggaacctagtgctccaaatgaaatggatggagtgtttgccatgggcgaagccctgcgatgtacagaaatgagtcagacaccagccatgccctcaaccagtgggggatggcactgtcatagggtttgctcagtgtataaagaggaatcactggaggtggtgctgcctgagcaaggtctgaaaggatgcctggaattatctaggtgaccaggataggggattccaaaccaaagggcatgagagccaaggcatggagttaagaactggtgtgcaattcagtgcacggatcgaggtacggacagagagaacagataatgtttatcaagccatgaccagttcgcatgctgtttttcacatacatgtaattgcatttaactcttactataatcctaaagagtaggtctcattaacttttttcaaaaattaaggaaaccaaaacttggaaaggtcaattgactcactcagaatcacagagctacagagctagtcaatgacagagccaggattcatccttgactctcttattcaaagcattttttaaccacagcagcttaccacttctgcacagatttgaaagaaactcagaagtttcctaatccaaactcccacccacagcagacatcctattttctatattcctggcatagtaattcagccaaagtttgagcaccagtactgggagctcacaaggcagcactgagatgatcttctgccttatagcacaccaggacctctctccttgtcacatcatctagctgtatccctcagagccacgcagacccaacctggctaaccctgcttctacaagctgccctctggataactaaggataattgttatgaccctttgaatcctcttcctagccaaacacaagaagttcctttgctccttgactgtaaacaaatatgtgctgtaaaaagttatagatggtgttattggggcacggaggaagcataaaggagggagttatcagctctacttggaggagtacaagaaagacattggaagcaatgaagcatgtcacaataggtctttaccaggtagaggatgcattttaagcatccttttgtttacttattctctcagcagttaattgaatactgttttgcaccaggccctgggtggggtgctggagatacagtggtgaaagaggctgatgtgatccccattcccatggagcatgaaacagcatcatgcattgggcaaatgacagagagctcagtggggtgggtggtaagaagtcaggacagtccttcggagggataaggtaggataggtaaagcaggcctgctgacaggtggccactgcacttctaataagcactgtaaaataaaatgatgacagcttctgtgaggtagtcagacacttaaaacatgttcgtgatgtgtttttatatagcagagaagaatctgaaattgggtttgcactttggccggggtttgctaatgctaattttctaaggagagagccaatcccagtggctttgagtaaccctcagtgttgtctattaatcttaacaggttaactccctacaaactgggaagtttctatttttcattcataagaaatacacctcggcagatccctcatctccagtacgcatgagtcccacattgccaggagaggtgtggaggtccccatcctggtggtgataccagcttctcagtgtatgtgtattcctttctatagtccacccatacacagctgccccagagaggaggtcttgaatgaaattgcacttggcctttagtgaaatcatacagaaaatatggctgagtcaagcaaacaccatctggaggattctctgcttccgagagaaccataagaaatgacttcaaagttgagacttccgttttttaaaacttctcacaggccatgaattaagaagggagcttattgacttatgtggcatttgccaggacatggcatgtgggtaaagcacgtgaattcagggcatgggatgtttaccattagttattggattattcaatgtatgaggcagcaacataaatcaagaggttgaatcagcttaaagtggcagcataataatcacagctagatactgaaatattggctaaaagcagagacttaatccagggggctgcgggaatgctggggagataggagaggagagtcataaatatggtagcgaaaccttataaaacttccagaggatcacccttctcctccctgcatgttccaaagctttgatgcttctgctgaagtgaattgcctgttgtcacctctacagaaagtgacctaaatttccacctgagcaaaaaatcaggaggtggaaaacctttcagggaatggtcacatggtgtgcgtgtttctcctggtggacaaggtgcatgaaaaaacacctgcacctgagatggagaaggtggtgatggggtcaacacaggtgcatgttcctgtgacgcggatgagtaacaagccccaggctttattctgtgcctacagtgcacacagaatttcatatttcgtatcacctactgcggacttacaaatcatgaatctgatcaaaaaaggacaacaagggaaaagttacacctgagttcaggtctctgccatgttgctgggtcaaattagtgtttctggttttgagaccctgtagtaatttgtttttataataaatgtttttctttacaagttgctttcacatacactagcccatttcattctcacagcactataaagaatcattatcttaatttttcagaaaaggaaatcgagacctagaaaagacaagtgagtagttcaaggccacacagtgactaaattaaaaaaattagccagggccaaaatccaggtctgcgtctatgtcaatgcagtattgtttacttatcttactaccccaccttcccaagagaaactgggaatggggaacagagcttactctgccatttttgtgacaggagctaaacacatctgatcctgccctgacataccataaatggcgtcagttggtttgatgaagtgggacccttcccccttcatgcttactgtggtaccaaattgatggatgtcgaagatgcagagcatgtcagcctatgagcccacatcccccaagctgtcaccaaacacagcacaagttaattaaatctgcattacttcatgatagctaataagataaactttctcccagaagccagcaggagttgatactgccttctcttaactggtactctgaagccaatggagcagtgtttgccaccagagagggggtctttaaggctcttaacaataacaggtgtatacacttcctgaaaaggagatgacagaaacatgtgatttctaaaagcgagttaacccttcagcatccatttaaagcttactagcttctatttagataaagattgtagggctttggctggaaagagggttgctatccccagaaaagtgtttcctggacccagacatgggtatatctgagaccaaggggacacataacattgttcagggttggcatacaaaggttaagtctctctaacaatatatatttcataaaggacttaattttttacaatagttcatagagaggaaagaactgcaatgtggcatatgggtgttatttccttttgaggaatctgtttttcaaaaactaaaagtttttctaggcatacactgcagtttgcacacatgatcacatctgtcccctgctaaggaggatgttacatttacactggcctgcagattctaatctgccttcatacttccttgagccacaagagagtgggcccatgagcaaagcaaacagacaacagcagccagagcccaaatgtttatggctgagcatttccaggctggaactcagggaggagtccccagaggatttttaaaacatcaagaggtacaaaaactatccttgccaaaaactatccccttaatcctaaagaacctattaaaaacagaaagaaagaaaaggaacctagaaaagtcattgctgctggaatgaatgtaaatactcatgattatatatctaatatttatattgatattattcatcttagaatgtacttataatatttatatttgagtatttttttacacatcctcaaactacagttttcacagtggggactggatctaacataatccattaattaatgaccatgatttaattacatgtcatgctatgggttatgacagaaggaaataagaaaaagagctatgaggctgagctccagttgctggtctaattacctctgtgctttaatctaaaacaggagatatgggtaagaaagtgaggaaccctgttgtcacaggatccttggggtgttgcttctccagctgaaaacctctatggctggtgacaccttttgcctgagtatttctcacacccactgggcttattctgcccactcagcccagcagactgcacttgactcacactactggcccagatcccacacctgccaagggcgagccaggcgtggagtagtgaggggtgtgtgggccactgcgcacagccaggcatgctggcacatgagcaagcatggggttcggccactgtgcacagcaaggcacgcccactgctatggcagggcaggcagctccaggcgccagctcaggtaccagctctgtgtgaggctgcagctggaccagatgtaccacacatggcttctgctgcaggcacttgcatccggacatgcagaatgcagtggtgcccagaagcttggagataccaggaaccacagaacctcaaagagagtgtcacagccctgacttggggatcccctaggtctgggcttttctctccttcttgtcgcccgcaatgtggagagcaggggaggtgtttttcagccctgtttgtgttacagctctttcagtcccaccattcgtcaggtcctgagtttttgtcctgtgtccaggaagaatgaatcacacagacaagtggaaggtgagcaaggtggagaggagcttcactgagtgacagaacagctctcaggagccccgcggtgggtagccccttactgcaggcaggttgtcccaaggagtatccagctctcagcagaaaggagacccacagtgggtagctcctctctgcagctgctagtctggatatctgtttgagtctggcaggatccagggtttttatgggctcagaagagaggacatgcatgctgattggtccatggctggccatggcagacccagaaaaagcaccataagttctcactccagtctgtggaatacctggaactgacagcccagcccccaggcttcagatagtccctggcttgaaggtggggcatcactggggacctgcccttttctgtccaggagcccatctgcctcctgccaccatcaacatgtcatccaccgtatccaggctgttcattttctgaagggcgcctgcaggcttgtgctgagccaccctcagcacccccgcagcttccctcccgtgctcatctatgcacaaagttgagatgggcccaaggtggcagcgggactgatgtgttagcaccaccctgaatgcatgcatatccatccaggttgcgacagaacccaggtttggccacaacttcgcttcaaaattggagtgggtgctgggagcagggagaggtcaaggagcaggagcaggcacttctgagcttgcaggggaaaggggtggggcttcctgggcatccaagagtgcagggatgcccaggtccagagctgtggctgggcagctgtggctgtgcccaggagtgcagggttcacacttgccaactcagtaggggggtggggctcccaccagccccgtggagcatgcaaccccagccacgccttccctgctgcagctggcatcttcacagtggccattccagacaggctatcgctaccatcactgtgctaattaccagggtgggactgatggtaaaagaaagggccaaaacatgtgaataaaaggtagaagtacccaaacgctagatttgttctgaaatacagagtttaatttttattgtattcacttatagctgttttttaaaaatgttaccattattcctatagggataaatatctttgctatcatgcatctgaaattatctggcccttttttccccctttggaacagtggcttttaagctggatttctgatgattcaaggtttctttgcaatgcagccattacattagaacagaacagcctattaatgtaatatctatagctgtatctcagaaacacagaagcttataaagaggtttagacttagactggctgaaatagaagggaaagggcatgtccacagaatagaaagtaacagatttcttaaatacataagctgctgtttccatacgtacttgaaaggtaatgcccaagtaactcagaagttacatctatttgatgggatgcatgttgtgattcatatgtgtacattgccacctccatgtggctgaggttagcattgggctcaatttgcattttaagcatagactactggtcaatatttaggagctagctagacgtgtgcaggctgtcagagactgagatgaagtcacatgtgaaaacagcagagtcagctggtagggttgtgaacttattatgaataaacattaaggcaggcctgaggttaagctactagctgtggttagctcgttcctttgttacttaaaggatctcacccttcatgcctgagttaaaatattcccttcctttgggaagacttctgacattctcccaggagacagaatttttcctcctctggtccctccattgtgctcacctacctgccaaagcagttatcttattatattatcatcatgtgttttcatgttgtttcttgaggtgagagaaaggaggcatcatatcctttcatctttacattcccaggccttatacctctttggccccaaacaattatttgttgaataaatgcaccaaaagttatttaaaaactagttttcaaaagtttcttgaaatagatcatgagatggtcacacaggtgttttaagttccatgaatattgattaatacatggcaggactacagatttggttggggaggaaaataggaagatgtatttcagggcatttaagtattatagaaccatttgtacagccctttccaaattttcagttaaaaacgccttcatcttctaagactttgtaagctggatcagtgccaagagtgtcttttatgactgagctgtaaaccagtggaaaatgggatttatgaattctgagtttgctggtgctacttatattgctcctgtcaaggattacagattttttaatgtttataagtagttagcattaaattcctgctttcttctgcacaaagaaatgactgtaccttgggacaatatgcttttttttttttttttttgagacagggtcttgttctgttgcccaggctagtgtgcagtggcataatcatagctcactgtaacctcaaatttctgaccttaagtgatcctccaaccttggcctcctgaagtgctgggattacaggcatgaaccactgcacttggctgggacaatatgcttaatgataaggaaagacttaggatgaaaaggagcatgatcatgggccagatctggctgaggaatgagctgctggtatgctacacattctcagttcacggggaaagggcactcctttaggctatgcctaactgatttaggaaaccactgtttcagttgtgggtttttttaaatttgtgtctccttttttataattcttttaccactgaaagtcttaccagattaaaagcagcctaattacatgtgaaatactcaggacctttggaaaatgtgcttccttcagtgggttcatatttgcacagttcttaaataactcacttgggtcctgaattctgccttaatcagttaatctgctttccaggatttcccttctgagggattaacctttcatcttactgtgctgtgaacatcgaacaggtagaagggaagccttcccttgccaaggataattctgctgtttttttgatagctggtagggcacatttacagctaatcaataacatagcatgtagtagaagggattaggaaacaatgtgagttgtgtttcaacaatttaaaattagtcatacttttctttagaaatgtcttttttttttcccctctgaaatcaacctccaagttcttgagggcaggagggaggtgcagaagaaatctaaactcaagtgatacattcaaatagcctccaatctgcagaaaccccactccaataaatactacaagcccttgcattgtgatctttcttcagctgaagttggtccagatgtaacttaacatattttagcctaaaacaaggagctctgtttactctttgtacctaatctgcaccagtctggcagtgaaatttggcagatgtagggaaattggatggacacccacaccaggtgaagcccattcaggtgtgcctacttctgagtggcatctttgtgactcagctcagagcccacatatcccagctcttgagccatttgtgtgttccctttgaaccttttctatcttccctggagtgcagggtgaatccctttgtgtactgatcatgcatattccacctttgtcacaggaggactgtgtccggggtccaacgatccttgtgtggagaagccgtgtccaggggacatgcagtgtgtcagttatgaagccagcaggagaccgttcctctgccagtgtccaccagggaagctcggagagtgctcaggtgcagagtggagtggaatgatgcagatctaatttcatattcctgaaacacttgcccttgagtaaattacaccatccaagtcctcccagaaaacgtttctttatgcatgcaaccttttcctttagaatggaccacagctaacatccacactcacatttacttaggatttatcacagctgcagcttgtgctaagggagcatgtaaagactatgggcttcttacataatggagagactgcaacatgtgttttttatcatgtctcatggctgttaagggtgtgaaattgtggaaaataaaaggctgttggttgggcagaggaatctgaggatctgtggcatggcctttgatgctcagggtgctgcacaaatccacagccgcaaaaccaagatccacagaaggcatagctaagccaatcctgttgaccttccttagagtcatccccatctggtgaaccaagtaagcagactccctactggaaatgtttaactaacttcatgttccagctggagaggtgctcacctctgcatcttaaggaaaaaaaaatcagtatttaagttattttaatctaaatgatcctgtttctgatcttcattcaatttctatacttcatttgattcatatattctctgccacttctttactcagaaaagaatatttttcattttgggtaccaatagaatcctctttaggtatatttaaaatataggcacattgataacaattttgggatccaataaatagttggaataaaaaaataaccatgcctagtatgtgcaaggaactttgcaagcattgagttctagaaattcagcctttgcaaagagaagcactgttcctaaaagtagaaaccaaagctccttcatagctgatttcaagaatggagctgcaattaagtaaagggaccacctggatgcttacctaagtcatgtaaggcttagaattacaggaaaattatgctgtctcctgtttctacatatgcactgtgcacatagcaggtggatgggtagggggatcataaagccaaatcttctaagttctggagtcacttcctgctgacttttctcctttctatctagaaaacttctgattgtctataattattgtccatttggtatatttccacatattccacctttccccccagcaaggcagcttttcagccattacttttcttgttaaaacataaagttgaaggcaatttaaaaaaaagagtaaactcagaattgagcaatcgagttggacaaaatttaaggggagcctcgaaattaatggccagaaagtgaaagtgtgactacatgaatttcctttatatcagttatctttttgcaacattagtacaaatgacatacattagctattaggcattaggatacttggggaacatggatatcatttggaaatggttttgttttctttgtttcatggagctgaaagttctcgaatgcctaagtgattgggggttgggggaggaatgaaggggtatcttttaataatgctcattttagaaagtgggagttggaaatttagtaacattaagaaaatccaagttgtggaatttaccaagtggctcttggcatgaggcaaataagatgatttggtggctgactggttaatatttttttcactctgaaattagagtgtgatgtgaaatggaaaactggtttttaatcaaaaatgatttctcctcattgccttcattaacttctcatgcatggtctttaatcaacttggttggtggttgttgggtgatttcatgtgtctctgttcctttctggatgttaaaaatatatatgtcttctcataacggtcttttcagggcacacttctctcagctttgctggaaacagttacatcaaatatcggctttctgaaaatagcaaagaagaggatttcaaactagctctgcgtcttcgaacactgcaaagcaatgggattataatgtacaccagagcaaatccctgcataattctgaaggtaattaaaatgggttatctttttctgcagtcagttctcatgttagtgttttggctcttggattggggaacggctgaaatcattttgtcttttaagttcagaagaccagaagcagacttctgggcaaaggggagcagcggcagaactgggaagggagccaacatcccatttccttttgaacattcagcttcaaaattggctcttggtacatggggcatctctcttgagagcgggttcaagggctggcttcctttgagctgtaatcgctcaacagttcattagaatgtgtctcctaatcaattccacaacaggggtggtcctttaaaaggattggctgtatcgttttctaccacatgggtctatccccactgacttttgaaggcaatttctgttcttgctcagggaggaaattggagacagggggtataggagatttcgtatgtcctatcatgacccaagtagcccaatttttcagtcatttcctagcctcagaaatgctcctaaagcagccagatttattttagagcaagtctgacatctatattcacctcaaggattctggtgcctttgtgaaaacaacaataataatggtaatgggccaggtgtggtggctcacacctgtaatcccaacactttgggaagctgaggcaggtgcatcacatgaggtcaggagttcgagttccagcctggccaacatggtgaaaccctgtctctactaaaaatacaaaaattagctaggcatggtagtcggcacctataatcccagctacttgggaggctgaggccactgcacagtaatctgggtgacagagactctttctcaaaacaaacaaacaaaaacaagcaaacaagataacagctttttgtgcatcatttatttttattatacagctaatatgataagtttgtttcatgttatccccatttgatcaagaggaggacagtggttcagagaggttaagttatttacccaaagttgcacatctaataagtgatgaggcctggatcccacactctagtctctctcactccatgccgttaatctccatactatccctcactctccatcttgctactacaactcatttattaaaaatcacattctgggcatctgtagaccagattcagccttctagtatggaggagagaaggcaggagaaggagggagacgtgtttcatctcatgctattctcaccaggttgctatgtcagcctgttgtaaatgctcttcagaaacattcagagtccgtccagtggaaaatgccttttcacctggaaatggcaagaaatctttttcttcccaaggtttcagcttgaagagtacatggtggacctttccagcttctgccctttgattgtttgatatgtcagatccaagttgattaggtggcccaggctttagttctaaaggcaggtgaggaaggagagaaatagagaacattaaatgccagtgggcttctcttaatgatcacatagggctttacttacccacgtctggtattgccaggtattatttgatggccatagttgagtgagcagggagtcgaagtttaaaagttggttacttttgtaagcagtctcccactctccttattcattcaactcagaattctaatttaagatccagaaaggaaagcaatatttttaaaagaaaataagaaaagtactttgattgcacagttttagagaacgatgcattcaaatcagatattcatggtgaaagaagaaaaactcaaaaacctaagtcctgcctttattttcttctggccccggaagcagcatgccttgggtcagtagatcattttctaaatagccctgagagttgaggttttgtataattgctgggaaagtgtttggagcattcagagctaccagctcttagggctctacgtgggcctcactgacctttctgtctcctccttcatgctctaacagggctggtggttgaaaatagtttctattagtaaatctcttatagagcattaaatttgagagagaacaaaaatattgaacctgaatggcttgatcctaaaatggagcttgtgatttgacacttcactggcaaaagtctaaaatgtgcagatcccagaggatacgaaagaagaataattaagccttttaggcagctccagctcctaaggtatattgcatttcatgaaacaagcatgtttctgaaagttgtgtaaattgaatcttggtaaatggaattctaataaactagagatggatgctatttgaaggaacccttccattaatccctttgtgatgtgaataatcactcccaatctgtctgttctgtaagtttgcttttcatatgttgggtttgcctaaagcaggacacagctgtactaaactattgcagttattctcctacagtcgccaggaatatccactaaggggatttgaatctgtttgcttaacattttcagcctcatgcaagatttaatttccttggctttaggtacagtatgtgccttgcactttggttcaacaactaagctgaaatgctttgtttaaattgcacctcttggttgtttatattttcccagtcagagcacattctctaaaaagtacttaaagtactcagtggggtgaagggcgccccttacagacaattaaagaattgcacagagacctcgagaagtgaaaatgctcatggacaaagaatatcactgtctctcagcaataataaaaggcactcattcttctgtttaccattgataccctatcttcttccaaaagaaattcaaggcttaccataagcatccaaatgcaataaaattaaagtaccattaagatgaaaatacaaggttaagagccaaccagtgaagttgggtagagtagaatatcattatgagaaagtctagaccgaggtgaactacttcagtagagcccaaaccataactgaggttcctggcagccaaagcaacaatgaaaatggtcagataggctctgtgactttcctcacacctataaaagaaacatggcattctttttcaaagggagatctggaaaagattttttaaaaagaagaaagaaacatgacaaaccaccagaagagatgtaaggagaaatcagtaggagaacactttatctctgtgtcagtcttccatctccagtatcatggcaaaagcacaaggagaatatggttgttaatctataactatcacacattttattttcgggggaagttataaatgattcattgctacattctgatgattctcagacatggctagcttcagacccctaaactgaaaggaggatagggaaagctcatttggtttgtaaaacagcccacttggcatggccagatctttccaatatagatcaaaagagtaacaaggaagctccctacaagatttgagagtttcaatgatctatttaagaatgtcaccaaaaaataagttaaccttaattacattttgtagtaataataagataactaagagtttacaaagtactttcacatacatgtaatttcgactctcattccccttgcatgtaggtatgagtgtctactttttttgcctgtgaggaaactaaggctcagagaaaattgaatgacttgctcaaagtgacagccagtcaatatcactttggttctaggcctatgaaagaggagagcaagttgggagttagatatctcttgataaactacaggagtttatcaaaagaagaaattcagagggctgggatgattatgcattcatttactcatttaaaatacttaatgtataccaaatggctattaatggcagccttaaaaataggtttttgtatttttgtttgtgggtttttttgttttttgagatgagatctcaccatgttccccaggctggtctcaaactgatcacttgatcctcctgcctcagcctcccaagtagctaggactacaggcacatgctactgtgcccaactcagggaaaacataaaaagtttttaaaacatccccttttcaaagaatattgaataatcctcttacaagttccatgattattatgcatttgctataaccacatgccaagaatctgaagcagtaagacttcatgccataatttacattttttactcaaaatcctactttcctgcaaaagtaggacttcttagaactctgatttcttgtcttccaagccccaagctactaaaaatccaggggaaagcacatcactgatttcaaatgatcctgagaatctaaatattttataacattagggcaacactctctcaattatgtatttcattgaacaaattacctagctacacccctaaccctagcaaatcatttcagtatcgttgctatagacatttcttacagtttcatgcacacctcaatttctattaaaatagcttctcctctgatttgagaaagcttcattctcttaaagaagatacttaaaactaggtgaacccaactctgaagacagagaagaattaaatatgatcagaatatattttccagtataagagaacatagacatgaaaagacagtgttcttttctctctctggaataatataactgtgcaatagcaaaagattattaacttttcacaaggtaacttttggcatcagtgttctagtttgtcatataaacaaagctggtaatttcaaagtcctaggattttgacaatccaaatgatttttgtttgtaaaaggctaagaatcgtgtaggcatctggcttccttcattcagcaatgttgctgctgttatttttgcaacaaaaataaaaataaaaagcaagcttaaccgtgccgtgttagtatgagataattttatgttcttcagttatagaactctgatatatttgagtacatcagagtcctgtcatttctccctggtgaatatgtaacttggtgattattcaaagaggtaggaggtgggggtgagagaggagaatgaaccaagtaatatgttaattgaacatctttttacaaaaacttagataaattgcactctcaccaccaatttttcataatagactgaggacaccagtttgtagccacagagttaaaaacagcaggtggactgtgccagaaaaagatactccccaaagtcacatttgatgatttattacttacattaaaatacaaatatggaaattatccaggagttgccatagagcaagtattctggtatgatttacaatatctactcattcaattttgtggaaccgaataaaatgacaaagatgatagcataagattacacgtgaggctgagtgcggtggcccacacctgtaatcccagcactttgagaggccgaggcaggcagatcacacggtcaggagatcaagaccatcctggccaacctggtgaaaccctgtctctactgaaaatagaaaaaattagctgggcatggtggcgcttgcctgtaatcccagctactcgggaggctgaggcaggagaatcccttgaaccagggagttggatgttgcagtgagccgagatcatgccactgcactccagcctggtgacacagtgagactccatctaaaaaaaaagaagaagaaagaaagattacacttgaaagctctcagagaacataaacatttgtcttcagtctttttacatttgcacatttgcatgacagagcaaagtatgtatgttctaactgtgtatgatgtggctaaccattctgcagtggacagagtagccttgtaaaataagccatagcagttctctctgctctccagacccaaacccagaggggccagaccattctctccagggtacctgagtggtacatgacaaagcctgaatttgattcagcattccaaaattcccacacctctgtgtgcttcttaaagccccctgacttctagatacacatgtttatgtggcatgacctacgaaattttatgcaggatgaagaacatggagctacaaaggcagaaatgagagtccctaagaattcagttgtctgtactgaagcatagagaaatacgtgacgtgtgagaatgagagatgctctgataatcccgaataggtctattatgagttaaacacgtttcacaaggactgcttcagtctatttctgtgaattcattttctctgtacctccttggctgtttgtgacctggaagctctgtattgtcctgtcatttcctttccttttctttttcttttctttcctgacaagtatctgttctctgcacagaactatgaatgccaacagactagtgttagttgcatgactcagacgctggcctccacaaggtcctcttgctgggtcatagacataggccagaaaagaagcttttatttcacaatttttggctgtgaatcccttcatgaccaaatgtacacttgtctagacaagggtgcagccctcattccctggatcccaaagccaccttgcatttctgagaaatgtagaacaaggtggacgacacaggggattcaaagacatgttttctttgcagcagttgagcctggggctccatggagggccaatccctgctctgcagctctctgccagcaaggatcctccatagcacatgctttcttcctgtgtgtgatgtctcctgggattagcctcccgggcgcagtgatgcccttgctacaccaatgcactcacagcagcaggctggtctctgttgtcgcaccccaaaccatggctgggagcattcatgagggccaggtgtcacaaacgatccagatattctaagcaaatggccaagccctgagcaccttggaagataacctttacctaaaccatgagcatcatcctaaaggcctattttaagaatatgctagtgtttaatatagagcagcttttaaatcttaaatgtagacaaagctgagaactaggaaatttttcatttctaccaggcctctttctttcccctgtggagcactcatataaatgtattcaaggaacatatatgtatttgtgtgattatttgattaatggccacctaccctacagactgtcagccacatgagggcagagatgataactctattcactcagatgatctccttggcacttagtacactgcttaccgtatagtagatgttcaataaatgctaatgagttcccggaattcattcctgtggtggtaatgactaagaagggtgcagagaataaacagacccctaaaccagatattgctgggaattttaaaaggtaaagacccaaggagtagaaacattcttaaatataattgtggatatatgaaggtgtgcccatattactaatcacaagatttgtgaaatataaggcatgcattttcatggcaggtaagggggaggcacagtggttaaaaatcaaaccacaacagatttatgagtagagcaaaagtcatgtccacattccagctttcttgtgaagcccccgggccggccaggagcagggtgtagggaacatattcccagttgcatgttgaaaagtgctgcactgttccttccccacgcagattgtggatggcaagctgtggttccagctggactgcggcagcggccctggaatcttgggcatctcgggccgtgctgtcaacgacgggagctggcactcggtcttcctggagctcaaccgcaatttcacgagcctgtccctggatgacagctacgtggagcggcgccgggcgcccctctacttccagacgctgagcactgagagtagcatctacttcggcgccctggtgcaagcggataacatccgcagcctgactgacacgcgggtcacgcaggtgctcagcggcttccagggctgcctggactcggtgatactgaataacaatgagctgccgctgcagaacaagcgcagcagcttcgcggaggtggtgggcctgacggagctgaagctgggctgcgtgctctatcccgacgcctgcaagcgcagcccgtgccagcacgggggcagctgcactggcctgccatcggggggtgagtgtggctacgcagtgggcactggcctgggggtttgaggggagagtgaatgaactgcagggggatccctgccctcccaacgcaaggactctactagagaggagtattcacacccaagatgctcgccaaccttcttaatctgctttagggaagtctcagctcttgacaattacaggagtgtccagttttgccaatcgtttgcagcttcccataggtgcagtgcagtggcacaggggcccagagaggccatcaactctgcccactcccctgtccaacccctggcctttcaagccagaggaggttgggcgaatggaacccccttttaaatatgccctcatgagccacctgcatgtcactgcagaatgatagtagcactatgagttatgatgcccatgcacatgaaattgctgaccagacgtagacataaaaccttactagaagctaagacttacaaccttactagaagctaaagcttactagaagctgtcccccaggaataggagatcttggaacatacttttgcaatgtgtatattaaaaataagtctagttacagctttacaaaggagtagaaagtcaagaataaggagaagggaatttactaaaatctcaggacaaataagcaggcaatgaaggcatgatctttactctaatatttttttcccacaaggtacatcatgaaagaggagagtaggcattaaaaaaaagcaaaagatttatagagagtttcttttgtttgaggggaaagccaagattatttaagtcctaggagtctagagataaaagaatccctgactttaccaagatgcagtgtctgtgttaatgtaaactaggtcagacatgctcccggttgaaggcttgccacctcgcaacagcccaaccactgattccacttcagtccctttgcagagtcgctcagcagtcgtgtcattaggaaatttaaaccttcctcacaaatcacttagagattctgctgtgcacattaccatctaatgttcgtgaaatccaactccaaatttagagtccattttattattagaatgttataaactgtccatgaaatgatgcactatcgaaatacagacaccaaagttgtttagacttgcatatgttactaccacaatgagggccaagtaccctggggggaaatttctgtcgtctcgatttaagaaatctatttgctgtttttactgtctcagcagtgtatgtaaataaagggttgttatggtgccataattcccaaatgatgggcagtaactatacttcagtggttctataaaccagcccattatgacaagtcatggctagtttttcaccaggcaaaacaattctgctagtgtgagccatctacgatatataaaaggagcatataattaaattgggttgaaatagaacaccactccatgtcaaatgctgggtacatagccacaaattgtaacatacttttaacgatggcaggacgttgtttttgctggcagggctatgggcttccacaatggattatctttaaaataataataataatcactgtatgagggaaagagactagggaatcttgctttgcagtgtgcattttaatttttaaaaaaatttcatgaaatccttaagctaagtattcagtggaactatgttaattaaatggctacgacccacatggggaatagcaattttctctatttttaaatctcttcatttaaccatatttcagcactgatgacccacttgccatatacttttcatataacctagagaacttgtcttgccctccctagggccccagccttgcctatagagcacactctccaatctacctctttgtcttcctgttcccttcttccttctgtgattgggcattggatcaggattctacaacaggtattctttcttccaaggagaaatagcctcttatcagttcaagtttctcttttgtctggggggacttacgttttcctaaaatgaagatggtatctttcctcaccttcatctacacagttcccttctcacaggcctactacctctgttctctgttccgttgagggagccctgcaggagcatcccgcaccaaggctactcccaagcctagccaatgggttcttatctcagtagacacccggacgtgtcccaggtggggaaatttgggactctcatgcacagcagtgctgggcccaaggctagcaaactccttgccactcaccaggagatccaagaaatccaggacttctgttgctttcctggggagccaagggcatgagattcctcttctgatgtgtgagggggtatctacctcttcctggctatagggatgaagccttggcttctaagaaaagcagaaagagaacccattttcttgcccctattgtctataccaatagtatatcaatagaggaagttttgctagagcctatatcctatctgcaaattccttaaattcgtgccaaacaggggagagaaaaaagggaagaaaagaaagaatcaaaatttggcctttacttcatatctatgaaactatgtagctaattaaaaggttacttaaaagaaaaatcctctgagctgtgagtgatagtttaaaaagaacaataagactgagtctttaatgaaagaatatttatgccttcaagaattccctctggctgccagggaagtctaatcacaggaagagacagtgttgtgcccccagatcaaagactaggctgcgtgaagtgttcaaaggggaaatttgggctagagatagtagaaggaggagcttgaaatgagactgcttgcacatgaggctgataacaaaacttaattgtttgaacattttctgttgtttggaccctctgctatgtgttgctctaaaatttcaggacacatattttagcataagcatccccttgaccactgaagaattctggagtattggtcatcggttctcctggcggcagactccactctcaaactgaggctatcttagtacattcagaattgttaaagcaggcaacacacaacaagaagcatttttcttttagggatacaggattctgccccaaccatctctaagcccaatcaaacccttggcgtgaaagtcagggaagccacaattactagcttggaatgacacagtcagcaggtttgatcagcattataactcttgctgtcccaggagcaggccataggaacctcaggggagtcagattccagaacactgacttgtaatgagagtataaatatgactctataaaccaaccacagagagaaggctctctctcggtaaagccttaaaattatatgtatttcataaacatgaactggaaatagcaaccactgtggagaagccatgactaggtcccattgtgatccctgcatttccagatgcagtgggcagggatcagcccaatgtctgaatgtaatatgtcaacacccacagtctgaataaggagtcctcagtcctccacgccttatcatgcttagctcaagcccattaatggaaaacacatttgaagccaggcagtcaccatgccataaatagtcattcaggcagcatggcatgaaaccagaagcctaactcctgagctcctgagatggaaacttggggagattcttaatggtaagagctaccgcttgttagactcttactatgtgcttggtactgtgataagtgcttaccttgaaagtgcttatgccctgggacatttaattctcaccacagtactctgaggtcaatactattcttctctcccacctacccaccctcattttacagataaagaaataggccagaggggctaagtcggtagcctagtatcacatagctagtaaagtggtgaaagcacactggctgggtgcagtggctcacacctgtaatcccagagatttgggaggccaggagttcaaggttatagtgagctatgaccataccactgcacttcagcctgaatgacagagcaagaccttttctctaaacaaaaaacaaaaattagtttcccaaaacagtgtgtagtggtattggtttatatttttttccttgaaaatgcaatggttaaaaagaaaaccaaaaaatatttaaaaagtgggaaaggtgggatttgacccaggtttgtagaccccttccccaccagcctgtacccttaacccttgctactcaaagtgttccagggaccaacagcattggcatcactgggaatgttggaaaggcagtatctcagatcccaccccaaatccactgaatcggaatctgtattttaacaagatccctaggtgctatagtgatttatctccctgtctctgaactgccctgaatcctggggaaactttgactctttttttcttacattgtatgtagtgttctcaaactctaagatgcatcagcatcacctaaggaccttgtttaaatgacaccttgttatagaagacccatttgattgctatttacttgcctccagtatttgctgtccacatcaggaactttctgctaggtcactgaatcatatttgcacatttctgaactttcctaccgagaaaatttatcagttggaagttaaggggaaacaaacaaacaaacatacagaatctgaattggcaagagtggaattcaagcatctctatttttaacaagcctccaaggagtttctatgcacacccattgtttaagaaccactgacatttgggaatcctgaaaactctatatttgaagaaatgcaagtcagtggattccaggaaaggtaaacagacataggacattcaggaattgagagtcggatgcgcagcctgcacttaaaaaaaaaaattagtataaaggtggagctttgtaccccagtcaggagattttggtaactctgagctccccttcaaagataagagtaatagtgtctgccactccctctaggcaattgtgagtattctgcctgtcaagttggatgaaacaagttcttggatgttgcaaatagtttgcataaaactgttttcagtagcactttggggccactttggatatgttttgctgaatactttgtgttcctaacttgtaagaatcgagataaatttagtccatcaaactttaattaagtacctccttggtgctgagctctgtgttgaattctgggtctcattgctttctctgtgaccaatggatgccactggtgtggcctccctctcctcacagctggtttaagggaactgaacagggttcccctacatgctccacccactggcttactgagcttcgagaagggagatgtcaaactcccagtaaatatgctgtggacataatttggctgagcttttcagcttatggaaaaaaatttttctgggtgactgtcttctaaatgctgacttactcttatatttttggtaccttggaaaaaaacctcatggtaacagcattaataattatagacactaatagaaaagctcaaaccctaaagtaggttatgtgcagatacatactagaaggtgagaatttactgtgtggataatgttaacacattaaaggtttccagatcctcaaagaaaatattagaggcttggcccaatatacaatatataaaatgtgagccagctttcctagggaaaaagtctcaccttcaaatttttattttacaaggtctaaaggttttgaatgtaccctgtttggtgaaagagaagaatcggaatgactgaaagttgaaatggcaaagtaacttcaactgtaacagagctcatcctcactcataattagaatctcacatgataacctatccaccagttttctcatactaattgaggctcacatggactagaggtttggatgtttcccagtcttcagcctaaacatcagaataaaaaaactcccatgatttccagttgtttggtttatgagcaatatagagaggaagctgatttcaggatctatagtaattacaataattacaacaataaagcacctaatgttgtgtgctgcattgtggtttatgaatccagaaaccttattgttcccgatgaagtgagtattagtgagtctcatttatcagataaaataaggaagttcctagaggtcaggccatggtcacacccaggtagtgggtaacagccagaatctaaacttgtacccagtgcctcaccaccacatcacagccacttccccgagccatgtaagttcttggagtttgtaaatgaaatccataactcagcaagcagagtggctgatgctgacttcagatcccaggtgctacttacacatttgtcattatttccacctttgtgcagcaggcagatctttccttatcaaggcagccaaacctgatcagaatgatgtttacctacactggcaagcagggtagagcgtttaagccataacctggatgaatcaggttggaaaatgactactaagtcaaaggaataagacaggaattatcttgattatttgcctacacagcccaaattaatgctataattgcttataccatttccatttttgcatttaatatgttttgcaatgctcttctttgagcaaggaaaggaggattcattttaagttggtctggatgcagatttcaaaaccatctgcatctgctataactagaaggattgtaaacagaaacacagctttgaggcaaggcttaaaaatacacttctcattttgccaggatttgaggggaaagaagctatgacttttcggtacatgtatctccacactagtaggaccatttcctttctaaaatctgagaactggcatgaagtgcatctgccactcattgactgtgtaacctcgtgaaacccatcttattgacgcttcagttttctcatttgtaaaataactataataacaatacttatggcatagggttgttgtaagaattaaatgagacagaatgcacagaaagttcttagaatttttcacatcacataagctattgttcttgctaattatttccttatttgatattctcccctctgaacaagaaaaaaaatcaattttttaagaatacgttgagatcaaccattgatatttttctttcacatttacaaaagtggtaaatattatttgtgatcaaaaaatccctagatatctcttagaattttgttcactttatttgtgttttataacaacatatggtaatgcttgggaagagtagaaactttttattctattatctttattatttaatgatgattggattcccagaaggagtttctaaaattgtccatctcactgtatcttatctgcttcccagagactgatgggaagtaacaacaagctcttctttcttatccctagaaactaatgagcttgggctcagtgataagttctaatacagtcttgtagaaagatttgagaatcagaaagcctagagtcaagtttaaactcaatctcttactaatgtatgttgagatggagtttcgctcttgttgcctaggctgaagtgcaatggcgtgatctcggctcaccacaacctccgcctcctggattcaagtgattctcctgcctcagcctcccaagtagctgggattataggcatgcaccaccatgcccggctaattttgtatttttagtagagacggggtttcaccatattggtcaggctggtctcaaacccccgaactcaggtgatccgcccaccttggcctcctaaaatgctggcattacaggcatgagccaccacacccggcctagtatacgctcttgaacaaacagcttaacctctccagcagccccaggagttgagatgttaatgagacctcttctttttccttcataggatcactgtgatccttcagagaatgaaagtgatttaaaaacactaaagcattagattacttagtatcattatggctactaatgaatgataataatcattattgatatttttgaaagtattaataatagggctaataccaggataatgagattataaataatattttgtgagaacaggttaattttcataaacaagccttttcacagaggctgaacaatagatatcactcttctttcactaaaaaaaaaatctgaccacttttaaaaaattccaattgcttttccctctcattgtgttaacataaaactcctccgaatttaaagttctaaaagcaagacttcttccaaaaggctctgcctcctatgccccaagggtttgcaatcataagatcctagacagtttgctgctctttctgataaacagaatgggtaatgaagtgtggttgttagaaatacagttcaggactgcaggagccagacttcctgggttcaaatccacacccactttgtgaccatgacaaagcaatcagcttctctgtacctcagctgcctcttctatagcgtgcttctaaatggagtttttctgtctttgtatccccagtgcttgccacagtccctattccaggggtgtgctggtaaaccagttctctaaaaataaaagccctgatttgtagcatttgctgatgactgcagtgtaagtacttccaccatggctgatgtcaggctacccgtggtttaacaactgacctgccaaattcctgaatatttaacagttacctcttgggaccctgtatgagttggcaccagccacaccaccatctatgacttaggcactcagtcgatgtggatatgttaatcagccaagctagctgctgcatcaagtagtgctagatactccacaaaagatgatgaaaacggcaaaattcagaaggaactgtgtataagtaaaattgtgctctagaggtagtgtcttattttaaattctgattttccaaggcacagagacatcaaattgcttctctgccatcagatcaaaaatcagtcccatgacctgagttagaatccagtttccatgatagtgatttaaatgtccctcagatctggaccgcccctccttgaccctcccctgcccccaggtgcttctgatgtagttttatttaagaaactgtcagaggcttgccaaagaggagctggagagggagttttcgccaagtttacctaccttgccttggactccccccattcctgacttccctccccatcattgatgtgcttttcagagtcctgtactgtggttgtctaagattatattctaaaaaagaatctaattcctcctcccaagttactgtttgtctaaagacatgccatcatagccaacaactagccaggtgacacaaagaagcgtttttcccaatcccagctgccttcaacaattttcaactctattaaagtgagcaatttcccaaaatgaaaaaaataaccccaagtcaacataacttcaagcaagcatacctcagacttctgcctctacccagagacctcaggctggccttctgtagacatagctggcatcaacaatggcctttccttaggagctccttggtctttccttggctttgcgtttaagggcattctttttctaatatctatgtgtcactctctgagtctcagtctctttccctctgtgtttcttgctgccaggaaggctggggctgcatagtctcctccacttggaaatatatagattgctctcttggctcctgcatctgtctcttgaagataagattttctctctgtgaacctatgaacacacaatcattcttccttctgtacctgggagttatctgtaatgggtattcagcaaaacatccataagagcatatgttcatttcaaactattcatttttaactatcttttatctgtagagatcaagctttataatcccaacatcagtcactgacaaatttgaagaggagaaacccaagagtccttcaagtaagagtgagaatggttccttgcagtagttacaaaaggtcttagatatggggaaagcctttttggccacttcagggtaagggtggcagcttgctgttacaaccccactgctatggaattaaagttatttttaaatgagtcataagcccatagaagtgaggagaatagggaagtagacaacaccaacacaggtttggaggtggaaggcagagagacaggtggtaaggaagagagagagaaaagaagctcttagagacctaaattccagctggtagaagggaccgaattcccaaaaactcgggggactgaatccccaaaaactcaggaactggaggcaccagtcacttctgaagggggagagatggggaaaagagcttaaaataagaattgctcaaaacggtttagaggcagtcaggattcaatctggattcccaccttccctctgcacaaccaggcaattgttcccccaatgctgtgacgaggcctgcaggtgatgttgaaatgcagggtctcaggactggagcatgccagacactgtgctgtacaggggttaaagtaaatatgatgtgcttattggatgctgaaactcacaaccacccctcctctgccaccacccaacctcccagtattagaaaccaggcctttaccttccctctgaacagacgataagatgagctgttgctagggaaactgaccatgacaaagctactgactcagttttacagttgctgagccccattaatgtgctcagagcttctcatcagatttctagttttctattgctatactcttcaatgtgaactaataagcaatggttacaagtaaagaaatcatctcatttggaagatagaaaatgtattagagttcttcagagaagcagaaccaataggagatatatgcagctactcctcaacttatgatggggttacatctcaataaactcatcataagttggaaataccttaagtaaaaaatgcatctaatacacctaacctaccaaacattatagcttagcctagcctacctgaaacacatttctactgagtatatattgctttcacaccttcataaagtcaaaaaatcataagttgaacaatcataaggcagagaccatttgtgtatatacatgagcatgtgcacatacatgtatgtggagagagactgatttcaaagaattggcttatgactgagcaggctggctggttgaaaattcatgtaagagttgattttgcagtcttgaattcaaaatctgcagagtaagccagcaggctggaaatttgggtaaaatttattctatgttacagtcttgaggcaggattctttcttcataaggccttgaactgaataatgaggcccacccatattatggagagtaatatgtttcattttaaggtaactgattatacattttgtcatacccaagtgagactcacagctaaaaatagaaataaataaataaattgataacatccacaaatacccaaataccttcactgcaacatctagactagtgtttgacccaacatctggctaccaataggctacccaagttgacacataaggttaaatatcacagagaccaaaacaaagaaacagagaaaagcaacttggaaaaaactgcagggagaaaacttcataaaagtattattaatatcctcagacagataagagaagatactataaccacaacacaggagcaggatgttatgtgttaaaaaaaaaaaaaaaaaaaaaaaaaaaaaaaaagctccgcacaaaaaaagttcttggaaaatgacaaattaatgaaatctcaataaaagtgaaggagataagaaactgtcataaaaagtaaagcaaaacctcatagagatgtaacataagagagaaaaaataaagttagaggaaggtccaggagatctgagatccaaaaaatagaagttccataaaaatagaatagagaaaacagaggaaaataaattaccaaagaaataataaaagaaattttcctaaagtgaaaacacaaaaatttccagattgcaagagcccactgagtatccagtattggctgaaaataaacccatataaagtacatcactgcaaaatctcagaaaattggaggcaaaaagatcctccaagatgttaaagagaggggaaaaaaaaaacaagttacatacaaactccaagagccaaaatgactttggatttctcaaaagcgacatggagggattgcttataattttttacacaacctgtcaaagaggtatcagggtgaagtaaagacatgttcagctatgcaaagtctcacaagatttccttcctataaacccttttggaggaagtaactgtggaatgcgttctagtgaaatgagagagtaaaccaagaaataggcagacaggtgatacaggaatcaccagatccaacacaggacagcaggaaagcagggccagaggacaacattcagggtgaagccagtcagagggcctcaggagagactaattcaggggatgaaaatacagggaagcagaggcaactaaactcggagagaccgggttggtgaagagtttctagttaaattaacaatcaatattcagaaataagcaagcaaaaacactggacattttttaactccagggaaaaccagttatgcatgaatataaaaatacaatcgagcttactacatggcttagctgcaaataacgtttcattgtcatcataatgcaaacactgcattgacttaaccaaaattataatactataatatattgtgagataggggcatcacaagaggtgttcctatgtggtgaggctgaaggtttgaaataaaaaaaagcatagtggaaagctaatagaaaatgcctaacactaaaataatcacaaaaatagtcaaatactatggaaggaaatattgaaataccaaaagggatacccaggttgcttcggaggaagtgtaaatgggagagaagactgctagtggacaaaataaaacttgtagaactgccttcctctttactatgtgcatgtatatctgtaatttaaaaaaacaaatcttacggttttttttaaaggagggaagaaagaacacccttactagttattcatcccttccatctcaagagataatgcatctcaagaggtcgataatgcctctttccacatctgatatttcatattctctgtagtgaggatattatattactaccaatttctgcatgatgggcttatgaggggagaaagtgaaaaaaatgcaaaaatcaggatcggaccaggggagctgggcaaaggctggaattccttccatttccctgtgcctttgccaatctggggttcatttgagttgacaaatatccttttacctgctctcccctcattccctctctgggtgggatttcagtacttggctaaggagaaggggcacacgagataggacagtgactcaggaaaagaggtagcatggtatcaatagtaaaccactcctgtctggaggcatctgccttgtgcagtaatagtgccggggagaaaacatcttcctccccatcttgggttctgctcttgaaatctgtcccttgggtgggtcttacagttctcactagcattcatgtatgtggttaattaggtgaatttttgtgggctagcaggaaatcccaactgtaacttggcatttttgtggcaagatgtttcaagcaatcaatttgctaaccacctttggaatttgggcccttcctattatacggttcaacaaagaattaggaggacatgttatagctgagtccaagcactcagccctagcagtggcatccatggctcatgaggtcctctgtttccccaggctatcagtgtacctgtctctcacagtttacggggagaaactgtgaatctgagattacagcctgcttcccaaacccctgccggaatggaggatcctgcgatccaataggaaacactttcatctgcaattgtaaagctgggctcactggagtcacgtaagtgagattacataagtgtctttctctacactgttctttattgctacaacaaaccagtaaacaactaatgagggtaaaatatttaccactaatagtacaggcaaagggttaacatctgcacgatacgtataaggagtgcttacaggtgactaaaatgttaataggaattatctctgggtagtagggtcatgagtaattcatattttctactttatgtttccctataccttcaaaattgtgtatgattactatgtagtctgtaactagggagaaaagaaagtcatctaggccacctaatatttctattataattcggaggcagacatactacccatttccgcagaatccattaactggactctacggcctattgttttttgatcattctgagatactgaaacttaccttccctttgcaaacctttctttcataagaaagaaacaaaattaaatatttgccaaaaggaaagagaccgttttaaattcctagtaaaatgccactttcagccatccttgatcgttttagaagtatatgtatgtaatctcaagcaagtgatattctaattacagatcagtcttacttattcattagagcaaatctcccgaggactttaccaggaaatacttaactgattttgaatcgttggatgtaatttaaagtaataaagcggcatttatttttaaatactctgtgattctgactaatttccggctgtcctcacctctatctgttcaaattaggtttcgtttggctacattttaaaaggtagattaccaaaaatataggtgattggaccttttaaatatcagaaaaattgctgaaatagagaaaagtgaaaaagaaggtctatgttctcaaataatactaagctaagaaagaataagactgaaacacttgccttataattatactcaaagtgagtcatggattgctttaaagagaataaaattgatttaattatttttcattagaatgctttagtcattcttcctgaaaatctacatgagtattagcctttaacataagcacagaatgttgaagacatgtagcccttcacccacccacctgcagcccccagcttcccagagggaccaaaaattactgtagccattagaggaaaatgtcagaaccaaagactttcctctggggaaaacctataaccgatatatagattcacagctctttgtctgcaattctacaatcccaaaagctctgagaacttaaagggtttggagtatgttagtggcaaactaatttggtggcaaaacctgttcaaaactgttttgaggctctttctactctttatttctctcatttagtgtgaatatccatatgtttcactgcagaaacactggtatttttgattatgggatactacggccagcaccaatttctgtgagggggaggagtattttacataatgtgaaagatatgtgctgcatgtccttgctaaaactgcacaattttaaattctgagatgcatctgctcccgcggatttggagtccagtaccttttcaatagcatctgttattctttctctttctcctcctctcctctcccacctcagtctcttcctttcccccaacccaggtaggaaaggaagacctgggagagattgggttgggaggaacaccttaaggcaaggtgatgacttggggaccacagtggccacagaaatgcctaaattaactccccctccccccccccaccaaccatctttgtcctgcttcatctgtaccctttaggtgcatcgttttcttttaaagatgtctgtgttttctcgagttcccgtataccaacgtgtgtgcactggtcctgacggtggggaggggcttctgtgtcgccgcaggtgtgaggaggacatcaatgagtgcgaacgagaggagtgtgagaacggaggctcctgcgtgaacgtgttcggctccttcctctgcaactgcacgccgggctacgtgggccagtactgcgggctgcgccccgtggtggtacccaatatccaggctggccactcctacgtggggaaggaggagctcatcggcatcgccgtggtcctcttcgtcatcttcatcctggtggttctcttcatagtcttccgcaagaaggtcttccgcaagaactactcccgcaacaacatcacgctagtgcaggacccggccaccgccgccctgcttaacaagagcaatggcatcccgttccggaacctgcgcggcagtggggacggccgcaacgtctaccaggaggtggggcccccgcaggtccccgtgcgccccatggcctacacaccctgcttccagagtgactccaggagcaacctggataagatcgtggacgggctgggaggcgagcaccaggaaatgaccacgtttcaccctgagtcgccccgcatcctgacagcccggcggggcgtggtcgtgtgcagtgtggcccccaacctccccgccgtgtcaccctgccgctccgactgcgactccatccggaagaatggctgggacgcgggaactgagagtgagtaggaagtggtaatgctcacccctcggtgcttacagggaacctgcaggggcgctgtgcgaggacgctacgggaagggagagagaccccgcatgcagagcattcgctatgacatgtgctgatgtcgaatgtgcacaccagctctggaaaattgtcctggttctggttcccatttacagatgggagaaatgaagctcagagagggtaacatcatgagcccaaggtgaggcagctagtaagaggcagtcagtaccccaactcaagtcttccaggctccaaaacccatcctcttctcacaatagcgggccactggtcaaagtgcaaaagaaaagaagaaagtatactagttattgtgtataaattataatagtgtgtgtgtgtctgggcctatgtacaaagtgcaaaaagccacttgagtgatgtccagaagtgtgctctggaaggctggaagaagagagtatttccagtcttagaatgaagacttgagagaagcagagggacacttcaattggaccatgatgagttaaagagtctggggaaaggaggatattccaccgtagggggacccatgtgatcagaagaaaagcaagtcatttcttcttggctggaatgtagagaccatgaaacaagagggggatccacaaggcagaaaggtggtctgggccagatggaggtgtttgcctcttcacttggcctcacacagcaacattctaggcacagggaagagccacaggtgcaaaagtcctggggtgggaaggagcttggtgtgtagaagaacacagaggaggtcggtgcagttggagcttgctgagcaccagagaacggatacattttaacagcagcactattgcaggtttttaagtaagtgactggcatgataatttacattttttaaagctggctctggctgatcctaggagaagaaattgaacaggctttcttcccaaaaagggaagaaagcagagggccagtaaggtactctctgtgaacatctctgtgagagattgttttccctgctgtagtgtccatcacaaggagactaaaggaagctttgctgtaacctataacttcatcaggacaaatggctttgtatcgcagtagcagctgtgtcctaggtagcctagaaggctatggttatagcactgtggcatatgctgagggagaaggaggaaacaggaagttttcagatggagctagagaccatgggcagccagggagataaaggttttcttcatggaggaaggggatattcctactgatatctttaagcatgagtaagatttcagtaggacactttggagatgccctcccaggaacaggaagcagctcagtgtagaggacaagtaaagggttacccgagagatgtctggctctgttgttcaggtgagaggtcaaggttagaagtgaaagtttgaacaacatctgcatgtaggatggtggactctgtaggagggtgaactcaccaagggaacaagaacagagaggatggtcaaaccaggcctccaaaagaaccctggagatgactacatgtgggctttgggcagaaggggagaagccaggcaaggagacaaacacttgccaacaaagaaagaggagggaaaaggagaggacccttgtgcagaagccaagagaatgtcagtaaggtcatcagtgttgaatgctgtgaaaccgccaaggaggacacaggctaaaatagatgtatagtgagcctgatgacgagaggagtcagcatctcaagagcttctcagtagagccatcaaggcagaagccagaatgcaagggttgagaaccaagaggtttgatgagaaagtcagggcagcaggtgaatgtgaagcacactgctgtgtgttgcatcatctccttaaaccatcatagtgcccccatgttggtaccattaccaggccatcattccacggaggaaaaaactcccttcaatgggtgaaatacgcacctgaaggcacctaactagcaaaaggagaagttaggattaaaacctgtgctcttaccagcactgttcttgggagctttggcaggaaggagggtgagcggtattagaggaagaggatttcttggtgataacagagggccaagaatgaattctttctattctagtgctgccccaacttgctatctgctgattgtctttctgtagacacatgtattttaagcagttgcccttgaatttcagccataaatatactccctctcaaattatctgttgagttagactccactataatcttgccaatccactagctaataggctcttttttatttagcaataaaaaaggggggagttaataaatgaaggagtggagaaaggagttttatgctcagcacttcattcaccagagtggattatttgtcatttccttccttgtgttcagggctaagcttgtgcacaccttgtggttttctgaagctcatcgtcatattttctgcaacatggctgttaggaggtgaatgtctccctggcatatctctccacttacatcggtcgtttagccaactcctgtggcctcagcctctgacagcagatgcagagccaccatgcctgttcctgacaccaccctttttggaagaaacgtgatttctgtggccacggagaggaacaaatgttcctttaatcacaagtctgtatctctttgtaccattgcgttacatgatgatttgcagctcttcctggtgatcactgccctcactccttgctgatgtgacagctttatttccagaattcacctcaggccaaaactcacatttccccccaaagtattgttgggttgtattgaatacatttccttctttgttaagcaaggcagagttagctggtgagacaatttctgggctactaattcattttgcacttggcaacctcaagatataggctgtttttattgcttcctttagtccatcaaataagaaagtagccctggtgtgtgtgtgtgtgtgtgtgtgcacgcatgtgcatctgtgtgtttctgactgtctttgtacggtaaagaaggaggacatatgtggttaagggcatatccacaccactgccagccctcctacctgacacagggtgcagaacatggtcactcccaaaaatgatacaatgctgccctctaggaggcaaagctgaaaattccacttactgtccagagatggaagttaggataaatgtaaaggcattcttgcctataaaatatttataccccattttaaaagttatctcatttaacctggtgttgacacctcatcagttcatgtaaatgatgtaaattaactctgaatggcaaagagcaatgcagccacttcatcctcatttcactcttcactcagttgcttcacttcgaggaagaaacagccacttttggctgtcagctgtttggaagctcatttactatgggctaagggtttcgaatccataatgtaaatcacttgattgacagaactttgcccccagtggcacagtcaattttctactgtggagctaaattattttctctaagcaaatgaaagtgcctcgagaagtgaactagctgagaggggtgggtgggactggaaataggcacaaggtaaccagtgtaatttctgctttctctttcactgtccatgaagacaaaggggttgatgacccgggagaagtgacctgctttgcaggtagtaataaaggcagcaactctgaagttcagtccctcagctccttccagtcagattctggtgacgacaatggtaagaagtcatcagatttgttcggagcgggtgggttctgcttcctgttctggaagaccatggttgggaggagggtggtgcaactggctttgtttctcaacctgttcatgggcttttgagcgtgttcaccaggtccctggtttactccattgttgggtgtcattgccaaaggagcccccattgagctgtagctgtgagcaggcccagagatctgtatcaggggttgatgtagttaccctgggcctccagtagtgagtcctcttttatttggtttgtggtggaactacttcatcccaaatgatattctctagcagacagagtaatttctttctttttttattttaccaatgatctcttccctcttcactgtacatccaacatccccgtcattagaaattagttcagagacaaaaaccttcttatagaaccagtggaatcttcattcaattgaatcccccttgtaatcatttgggttatgggctgttggagaatttattaaaaactgtgaagcagctccttagaaaaatgcacatacacccaaaatgttgcatgcaatttctcgtggttcacagactttgttgacactccaaagctgctacctctacctcttgtgaacttatgcttatggagagggtgctaatgttggactgggttttctgagctgaggaaccagcttcggaggatgggttgttctccccagggcaggggagggaagcaggaacagtcataaaacagtgagtgttttcaacgtgctgggtaaactaagaataatttcaaacagtcatccacagagacaagcagccttaccttaggtcattttcccatttgtcagcaactagcaacaaatggatacttattaatttatgtaatcattcaatctataaatccttgctgaattttttgcatgtgctgagtccttttcccagagtacaaaatgagaaaggcatagcccttgtcttcaaggcaaatacagaaacaggtgagctccaagaccatagaagcaatcatggaagtaaaagagcctattttcatcaccactttcaaatgatggcacttctgagaagtgcagatgccttcagtgtatctatctactgggacaacaaatcacctaacagtggactttttctgaccattatcggaaggtcaaagacacactcccagatctgtctgccttgatgtatcctcttttcctcctccctagccagaagaaaagctgtggctagtttgcactttatatagaaatacctaagaatatagagtccagagtccaggcagcagctccaacaatgatgcctggttaactgttctcatgggctctgctgtgtgcaccctgaggatcacactcttgcccttttagggttaaccttccaagttggtcccaaatgaggcaggtggtgttaggaactttcatcaaattggttttaagcctgatcacctctccacaagcctttgtactgagcattaaggcaacccatatagaccacagatatctccttctctattctaattattcgagaggccaaatgctgacttctgtccacactttactggtgggagctaggccttgggtcgttctgggctgtcagtggcattatgtgaccgtgaagccatcaaccctgcaaaggttatcctctatcactggcatttggttcagagcagcatgactgaccaacaaataattatccccggaaatagtgaggtcttcctctgagagcctttgggagttgttaacgataaattagcaagagcttgatgagccactgccttcctaaattgattttgctgagtcatgaggggtgactttatgactcagcaatcatgacctatcctgcctttcaggaggactggcattggatttgctgccatttatcttccattccacaaatcccgggaccctctagataaaggtgtccactgatacacttcctaacagattgtggggaggctttgggtgtttgcatgccgcaccttcattgttgctgttgttgttgttgttaaaataaggtgtgtttaaaatatacaactaacctgaagctgtccttcccctacctccgacttcttttcctgaccacaagcctccatagtgactgtcattcagcttgtcaacaatgtagttgacactatagagaatgaaggtatttactttttttcttccatagcatttcttgaaattttgcttccttgttactttggactaggagtgattttaatggattggccacagagggggcaataaacagctggtttctgatgagatgtgggatatttatggatctgttttaaaattttgaaaaaaaaaaaacccagttcataatttgtaaaaaatatataaggtaccctctttataaaatccctttcaagaaaagagcacccaattagttgcaatccagattaatactaaatttatctttatattcaacatgtgttcattgagcacctattatgagctgggaatccttaagaaatcattcacagctgcaatattatggatacttatttcaaccacgtaacttttattagtaacttaataaaattagggcctggcataaatgtgatttatctgttttgttttgctttgttttttccctaaataacaatgggaagaaataaaaaaggctaaacttagtcgtagcccacaggcctttaggagtatgtttttaaaagtcatctcaaatgttctgttttatccctcttcacatggtttggactgtcagttttacttttcactttgtatttaaacagtgtctgtcatggaccaaggacagaactacaaccgaggtgactgtgccgcaaccctagcataactttttgtgtgtttgttttgaattgctgagttcattcttaccctgttcctgtgcctctgccctgatctgaattttgcatgtctcaggtgtctcgtgcgctcagtattggaggtgaaagctccaccagcattcccctcctagcctcatcctctgtgcgtgtgtttcacccatttgcctgcacgccttcctgcctcctgtggtccacagcacagctgatggacctctctgcaagcatgttgccagtctggctctgcaatagcatgtgtctaggaagagggagtggggacagtactcaggggtcctggaactgtctcctcggcgtgccctcgctcttcgtctcatggcatggctgagtgtgaggctctgcagcaaccaggcatcaacctgtcagagttgccatcaccttgttgtccgcaggccaaagcatggctggccccatagacccttgtaataagcttcttagggtttcttggatgctaaaaattgcatgtcaggtcccttccctgctcctttcccagcaaagcaccaactccagtctagaggaaattaactgtcatggtttttctcttgcagcctatcactgggacacctctgattggatgccaggggcccgcctgtcggacatagaggaagtgcccaactatgagaaccaggatggagggtctgcacaccaggggagcacacgggagctggagagcgattactacctgggtggttatgacattgacagtgaatacccaccccctcatgaagaggagttcttgagtcaggaccagctgcctcctcctctcccggaggacttcccagaccaatatgaggccctgccaccctcccagcctgtctccctggccagcacactgagcccagactgcaggagaaggccccagtttcatcctagccagtatctccctcctcacccattccccaacgaaacggatttggtgggcccgcctgccagctgtgaatttagtacttttgctgtgagcatgaaccagggcacagagcccacaggcccagcagacagcgtgtctctgtccttgcacaattccagaggcacctcatcctcggatgtgtctgccaactgcggctttgacgattccgaagtagccatgagtgactacgagagcgtgggagagctcagcctcgccagccttcacattccctttgtggagactcagcatcagactcaagtgtagacatcacatcttgggtacttcaccctgtttgttacagaaaagtggaagcagattggctgggcttctgtcccagtggagcattgtctgtggaatgagaagggaatactgtatttttccactagaaacttcttcacaagtcatactgtcccaacaagcaagcttgattccagttgggtgaaaatgaaaggctcagaaattgtttttgagaggtgactggtaatccttgatgtaggtacctatgttcacagctaaaaatgcaaagagggaaaaattatttcacccactaagttatacagccagtcttgtatggctttgtgcagtattgtgccctggaaagtgttacagcatcagtccttgcagtattaaaaactggcaacaatcaaagaggcattgttgcatgtaattttgagccaatgaaatgaaaatagtagtaatgattgttggaaaagttagtctcttaggcgaaagagaagagaaacaaatattattaaacaaaccagaaaatgggctgaagccttttaaatcaactctatttttttgataagctgcccaattttcagctataaaattaggcttgaataacatgtttagtatgctcagttatttctgtttgtttgtgttaagcatccaatctaatatagttgggttttatgatcttcaagaaaggtatcaatgaagagcaacatgaggctttttgggttccatttggtgggtgggggaggaagttaaagttgtttgaacattagaaagaatgtgattatctggttggttttgtgttttctggtaaatattccagttggtaaatctaacattgctacagaagttggctttgttcatatagcttctctacaattagatatttttagaagtttaagcaaaactcacaaattcaggggggaaaaaagaaaaaacgataccttcaaagtttgcggcctagataatcacaattcttcataatgcagaggaaaggtgtctgttattctaaatcggtagcatcaccattataaatacaattatgttaagaaaagaggaaagtagactagttattgtgtataaattataatagtgtgtgtgtgtctgggcctatgtacaaatatgtgcttgcactcagtaaggctgctcttgaggaaagctaatgtgaaggttttgggaaatggaccatgttgaaaattctgccggcgagcatggcatacctttcaatttctctgatctctatggtgttagagaaacatcaaatgccatattttactctggttcagttaactttattttggtactgccaataaagcaaaattgtgcttttttttttttttctcaagacagagtcttgctctgtcacccaggctagagtgcaatggcatgatctcagctcactgcaatctccacctcctgggttcaagcgattctcctgcctcagcctcccaggttgctggggttacaggtgtgtgccaccacgcctggctaattttttgtatttttagtagagatggggtttcaccatgttggccaggctggtctcaaactcctgacctcgtaatccacctgccgtggcctcccaaagtgctgggattacaggcatgagccaccgtgcccagcccaaaactgtgctttttaaaaacagtattttgttataattttccagaacttacctctgttttaaaagtgtgtaatgtttgattacaccctgggattcccttctcatctgtgggctttggccatgatttccaaaattaacaggagaatcattccactggaaatataacaatccagtcctcaaaactgaaagttgacaggttgagggactttccttttttgcttcaatcagattacggccgcctgtgcagtggccatggtaaatatatgcatatttgcactatctgcttaatgagcaaatctgtgtccacagtttctgatgacatatggcattggtgtgtaaattgtactgtccctagtctgtgcattattcactcagacatatttttagttatttcaattgcgtttaatccacttcttttttatgagtcagtgtttctgaatgtttatgcaaaaaaaaaaatcctttttcattcccaaactttctaagtaagtggatacactacacttcacaagttttccagcctttctcttcctgtctcttggtcagacctactcatggaggtattatccacactgtgatcttgaaataaatgaatttcactaaggctgctttcgagaacaaagtctttggtatttttcttatgtaagaagcacatttgcaagaatcatggaaaaaaatgacaaactaatggcctagaatagagtgactgctacactttaagtaatgcaatgacataaaaaccatcaaagtaaaaccaacatgtcatttcctgcccccaggaaatattagaatgagattaatgctgatgagtccctactgcttacacagcatctctttgagggagaatgcctgactgacacagtaatgaaagaataaatagatcctaatgcagtcatgaagccactgaagaaaattgtgcccaccctttgctgtgacctatataaaatatctctttctttgggatatcatcccctgattttctgcagaatagctctgcagctaaatatataccaggcaagcatgtattgtgttttgatttattatctttaaacacatgatatctcttcactttttggaaagttagatttctctgtagattatgaaatgctttgcagtcaggccaagatgctactaggtggggatgatcactaattcaaaaaagctggaagaatcctatttgctagtccaaactccttattttatcaaagaggaaacatacccagagtgggaaagagacttgcccaagcccacagaggaagttaattcgcttaacaaggagtagaacccatccatctagccaatattctttttacatcatattgttcacccctacactgccttgagcatgggagtcacctggttctgatggaccctctgacttccaccattccttctttggaatatgctataaaagaaaattcatggagaatatttttctgaaagcctcatgatcttatgtttccttgcagtccccctagggagaggggttatagaattcatacatttctgtagacattcatcgaaatgctgcttttgccaaatgaatgtttgtataatagggatgaaatgataattacagagttcagctcagaccagtcatcagttgtagtgaaactttgattatactgttacctactggttgcatttttggttttggttttgcatttttttcttcccacaaacactggctactctttgtcctaccccctccaccatgatgaaccatgtggaaactatttaaatcaattaatgtctttctcatttttcgaacatgtatgtgccacctcctggaagccatttcccataatctgttgtaggcactttactagtattgcacacattctggttaggttgagaatagctagactcttggtgctcgtcatatagtaagcaagaacttgggagtaataaaaggtgaataaaatgcatgcttcatttattccctttcctctatgaatattttgctgctgcattctagtctatgccagctttccatgtacccttggcctgcctattcatgaaatgccatataaaagacttaggaacatgagtaggtggtccatgctttgaggttcatccaattagggaataaatgtgaaaggctggaaagggaactagtttctgggatttgcctggaacttcccttggacattactagcacattctggaaaaaaagcaagttgaacatatctaccatcagtcctctcctacttacttcccaccccaccctatccactacccccactgatgctatgtttgcatcatcaaagtcaggggaattgagaaaagagattatcaaaataaattattaaaatccagaaaacagttttatgtgaagtaattcaggaagatctagtgttcattttgcatggattgtccagataattggctcttcactccgctgccttcccagtgcacaggtattgctaaagtggttaggctttaatgttttatgtttttagtttcaaactatgggaaatggagatttgaagaggcatttattccttgtcatcattttgtgtgctctgtgagaaggtggttatatgtttttgctggtttgtgtcccacagtgttcaactgcacattattctgatgaaaatccacaatgtctttgagcttctggttgtgtaatgctggggtttaaagtcaccatttgtgggtttggcatcaattaatatttagccagctggctaagagataggaaaagaatatgatatttctttccttatgtaataatgaaaagcaataattacaagtaggtaataatacacaaaggccataattagtctcttctagtgtttagaatgcacttgagaatcgtagagtcatttggagcgtgtttggaccaattagtatgtactgtagtacccttctggcaaacaaataactgaattgctactatttaacaatcttatgagcccacactactgcattttgggagtggcaaatgtgtttggaaatggaagcagttctttttaagcactgtatcagagagattgtcttgtacgtttgcctgttgcaaacaggctggtttgtaaaagatgtatgttttggtgtttgaaatgtttataaaattgtatataaatggtttcaattttccaggcttttgtagatactatatttgatgcctatcaggatgctttaatttggggggtcgaatataattgtaagtcatccacgctgttggtctgcaaacttttgaggtaactacacacacacacacacacacaaggattttagatttgaaaatgatgttttttactcatttcaaaatgtactgtaacctttctttggttcttactgttttcatttaactttctctgttttcaagaaaaattgtctttattgacatttgtaaaaaagaatgtgttttgcccagttattaagtattttatttttatgcaatttcagaatcacaatgaggtatgccatttcttcatatacatgcacattcacctcaacttgcacacacatcacacaccaaaccttatgcaaaggggaaagctaacacttagagtggattttgtcccttaaggaaatggattgttcctgcatatattgctggtggcagtattcagtcttgtgttctttttctaaaaaaaaagaaaagaaaagaaaaaaaaaacaaaagcaaacaaaaaaaaagacagccaaaaaaaagaaacaacaacaacaaaaaaaaacacaacagtgtacaggtttgtaactgccaaaatttgatggttaaaacaagttttcaagtaaaaagaaaaaaatgaaa

SEQ ID NO: 4 - protein, 4589 aa, Homo sapiens
MDIIMGHCVGTRPPACCLILLLFKLLATVSQGLPGTGPLGFHFTHSIYNATVYENSAARTYVNSQSRMGITLIDLSWDIKYRIVSGDEEGFFKAEEVIIADFCFLRIRTKGGNSAILNREIQDNYLLIVKGSVRGEDLEAWTKVNIQVLDMNDLRPLFSPTTYSVTIAESTPLRTSVAQVTATDADIGSNGEFYYYFKNKVDLFSVHPTSGVISLSGRLNYDEKNRYDLEILAVDRGMKLYGNNGVSSTAKLYVHIERINEHAPTIHVVTHVPFSLEKEPTYAVVTVDDLDDGANGEIESVSIVAGDPLDQFFLAKEGKWLNEYKIKERKQIDWESFPYGYNLTLQAKDKGSPQKCSALKAVYIGNPTRDTVPIRFEKEVYDVSISEFSPPGVVVAIVKLSPEPIDVEYKLSPGEDAVYFKINPRSGLIVTARPLNTVKKEVYKLEVTNKEGDLKAQVTISIEDANDHTPEFQQPLYDAYVNESVPVGTSVLTVSASDKDKGENGYITYSIASLNLLPFVINQFTGVISTTEELDFESSPEIYRFIVRASDWGSPYRHESEVNVTIRIGNVNDNSPLFEKVACQGVISYDFPVGGHITAVSAIDIDELELVKYKIISGNELGFFYLNPDSGVLQLKKSLTNSGIKNGNFALRITATDGENLADPMSINISVLHGKVSSKSFSCRETRVAQKLAEKLLIKAKANGKLNLEDGFLDFYSINRQGPYFDKSFPSDVAVKEDLPVGANILKIKAYDADSGFNGKVLFTISDGNTDSCFNIDMETGQLKVLMPMDREHTDLYLLNITIYDLGNPQKSSWRLLTINVEDANDNSPVFIQDSYSVNILESSGIGTEIIQVEARDKDLGSNGEVTYSVLTDTQQFAINSSTGIVYVADQLDRESKANYSLKIEARDKAESGQQLFSVVTLKVFLDDVNDCSPAFIPSSYSVKVLEDLPVGTVIAWLETHDPDLGLGGQVRYSLVNDYNGRFEIDKASGAIRLSKELDYEKQQFYNLTVRAKDKGRPVSLSSVSFVEVEVVDVNENLHTPYFPDFAVVGSVKENSRIGTSVLQVTARDEDSGRDGEIQYSIRDGSGLGRFSIDDESGVITAADILDRETMGSYWLTVYATDRGVVPLYSTIEVYIEVEDVNDNAPLTSEPIYYPVVMENSPKDVSVIQIQAEDPDSSSNEKLTYRITSGNPQNFFAINIKTGLITTTSRKLDREQQAEHFLEVTVTDGGPSPKQSTIWVVVQVLDENDNKPQFPEKVYQIKLPERDRKKRGEPIYRAFAFDRDEGPNAEISYSIVDGNDDGKFFIDPKTGMVSSRKQFTAGSYDILTIKAVDNGRPQKSSTARLHIEWIKKPPPSPIPLTFDEPFYNFTVMESDRVTEIVGVVSVQPANTPLWFDIVGGNFDSAFDAEKGVGTIVIAKPLDAEQRSIYNMSVEVTDGTNVAVTQVFIKVLDNNDNGPEFSQPNYDVTISEDVLPDTEILQIEATDRDEKHKLSYTVHSSIDSISMRKFRIDPSTGVLYTAERLDHEAQDKHILNIMVRDQEFPYRRNLARVIVNVEDANDHSPYFTNPLYEASVFESAALGSAVLQVTALDKDKGENAELIYTIEAGNTGNMFKIEPVLGIITICKEPDMTTMGQFVLSIKVTDQGSPPMSATAIVRISVTMSDNSHPKFIHKDYQAEVNENVDIGTSVILISAISQSTLIYEVKDGDINGIFTINPYSGVITTQKALDYERTSSYQLIIQATNMAGMASNATVNIQIVDENDNAPVFLFSQYSGSLSEAAPINSIVRSLDNSPLVIRATDADSNRNALLVYQIVESTAKKFFTVDSSTGAIRTIANLDHETIAHFHFHVHVRDSGSPQLTAESPVEVNIEVTDVNDNPPVFTQAVFETILLLPTYVGVEVLKVSATDPDSEVPPELTYSLMEGSLDHFLIDSNSGVLTIKNNNLSKDHYMLIVKVSDGKFYSTSMVTIMVKEAMDSGLHFTQSFYSTSISENNTNITKVAIVNAVGNRLNEPLKYSILNPGNKFKIKSTSGVIQTTGVPFDREEQELYELVVEASRELDHLRVARVVVRVNIEDINDNSPVFVGLPYYAAVQVDAEPGTLIYQVTAIDKDKGPNGEVTYVLQDDYGHFEINPNSGNVILKEAFNSDLSNIEYGVTILAKDGGKPSLSTSVELPITIVNKAMPVFDKPFYTASVNEDIRMNTPILSINATSPEGQGIIYIIIDGDPFKQFNIDFDTGVLKVVSPLDYEVTSAYKLTIRASDALTGARAEVTVDLLVNDVNDNPPIFDQPTYNTTLSEASLIGTPVLQVVSIDADSENNKMVHYQIVQDTYNSTDYFHIDSSSGLILTARMLDHELVQHCTLKVRSIDSGFPSLSSEVLVHIYISDVNDNPPVFNQLIYESYVSELAPRGHFVTCVQASDADSSDFDRLEYSILSGNDRTSFLMDSKSGVITLSNHRKQRMEPLYSLNVSVSDGLFTSTAQVHIRVLGANLYSPAFSQSTYVAEVRENVAAGTKVIHVRATDGDPGTYGQISYAIINDFAKDRFLIDSNGQVITTERLDRENPLEGDVSIFVRALDGGGRTTFCTVRVIVVDENDNAPQFMTVEYRASVRADVGRGHLVTQVQAIDPDDGANSRITYSLYSEASVSVADLLEIDPDNGWMVTKGNFNQLKNTVLSFFVKAVDGGIPVKHSLIPVYIHVLPPETFLPSFTQSQYSFTIAEDTAIGSTVDTLRILPSQNVWFSTVNGERPENNKGGIFVIEQETGTIKLDKRLDRETSPAFHFKVAATIPLDKVDIVFTVDVDIKVLDLNDNKPVFETSSYDTIIMEGMPVGTKLTQVRAIDMDWGANGQVTYSLHSDSQPEKVMEAFNIDSNTGWISTLKDLDHETDPTFTFSVVASDLGEAFSLSSTALVSVRVTDINDNAPVFAQEVYRGNVKESDPPGEVVAVLSTWDRDTSDVNRQVSYHITGGNPRGRFALGLVQSEWKVYVKRPLDREEQDIYFLNITATDGLFVTQAMVEVSVSDVNDNSPVCDQVAYTALLPEDIPSNKIILKVSAKDADIGSNGYIRYSLYGSGNSEFFLDPESGELKTLALLDRERIPVYSLMAKATDGGGRFCQSNIHLILEDVNDNPPVFSSDHYNTCVYENTATKALLTRVQAVDPDIGINRKVVYSLADSAGGVFSIDSSSGIIILEQPLDREQQSSYNISVRATDQSPGQSLSSLTTVTITVLDINDNPPVFERRDYLVTVPEDTSPGTQVLAVFATSKDIGTNAEITYLIRSGNEQGKFKINPKTGGISVSEVLDYELCKRFYLVVEAKDGGTPALSAVATVNINLTDVNDNPPKFSQDVYSAVISEDALVGDSVILLIAEDVDSQPNGQIHFSIVNGDRDNEFTVDPVLGLVKVKKKLDRERVSGYSLLVQAVDSGIPAMSSTATVNIDISDVNDNSPVFTPANYTAVIQENKPVGTSILQLVVTDRDSFHNGPPFSFSILSGNEEEEFVLDPHGILRSAVVFQHTESLEYVLCVQAKDSGKPQQVSHTYIRVRVIEESTHKPTAIPLEIFIVTMEDDFPGGVIGKIHATDQDMYDVLTFALKSEQKSLFKVNSHDGKIIALGGLDSGKYVLNVSVSDGRFQVPIDVVVHVEQLVHEMLQNTVTIRFENVSPEDFVGLHMHGFRRTLRNAVLTQKQDSLRIISIQPVAGTNQLDMLFAVEMHSSEFYKPAYLIQKLSNARRHLENIMRISAILEKNCSGLDCQEQHCEQGLSLDSHALMTYSTARISFVCPRFYRNVRCTCNGGLCPGSNDPCVEKPCPGDMQCVSYEASRRPFLCQCPPGKLGECSGHTSLSFAGNSYIKYRLSENSKEEDFKLALRLRTLQSNGIIMYTRANPCIILKIVDGKLWFQLDCGSGPGILGISGRAVNDGSWHSVFLELNRNFTSLSLDDSYVERRRAPLYFQTLSTESSIYFGALVQADNIRSLTDTRVTQVLSGFQGCLDSVILNNNELPLQNKRSSFAEVVGLTELKLGCVLYPDACKRSPCQHGGSCTGLPSGGYQCTCLSQFTGRNCESEITACFPNPCRNGGSCDPIGNTFICNCKAGLTGVTCEEDINECEREECENGGSCVNVFGSFLCNCTPGYVGQYCGLRPVVVPNIQAGHSYVGKEELIGIAVVLFVIFILVVLFIVFRKKVFRKNYSRNNITLVQDPATAALLNKSNGIPFRNLRGSGDGRNVYQEVGPPQVPVRPMAYTPCFQSDSRSNLDKIVDGLGGEHQEMTTFHPESPRILTARRGVVVCSVAPNLPAVSPCRSDCDSIRKNGWDAGTENKGVDDPGEVTCFAGSNKGSNSEVQSLSSFQSDSGDDNASIVTVIQLVNNVVDTIENEVSVMDQGQNYNRAYHWDTSDWMPGARLSDIEEVPNYENQDGGSAHQGSTRELESDYYLGGYDIDSEYPPPHEEEFLSQDQLPPPLPEDFPDQYEALPPSQPVSLASTLSPDCRRRPQFHPSQYLPPHPFPNETDLVGPPASCEFSTFAVSMNQGTEPTGPADSVSLSLHNSRGTSSSDVSANCGFDDSEVAMSDYESVGELSLASLHIPFVETQHQTQV

SEQ ID NO: 5 - DNA, 12025 bp, Homo sapiens
  5'UTR (1)..(40)
  exon (41)..(146)
  exon (5500)..(5640)
  exon (10199)..(10647)
  3'UTR (10648)..(11531)
tccgccggctcacgtgaccgtctttgggccggcgcgaaccatggccggcatggtggacttccaggatgaggagcaggtcaagtcctttttggagaacatggaggtggagtgcaactaccactgctaccacgagaaggacccggacggtgagcggctccagcgcagcccggcgacgcgtcggggagggacgtgcccggagaggtctggtctgcgacctctgagaggctggagaaggaatcacgtggcgggcgggggacggggtctgtggatcgcggtgaccgcgtgtgttgggaagggcgatgtgtcccgggaagaccgagccaggaggccggggcgggtaggaagagacgtgctggggcttttgggttagggactggggatccatcggtgaacagatgaaactccctgccctcgtggagcttccaagctagtgcggggagtcgggcaataagcctcaggtaattcatgaaatcgtgttcgaaagtagtaagtaccggccgggagccgtggctcacgcctataatcccagcactttgggaggctgaggcgggtggatcacgaggtcaggagatcgaaaccatcctggctaacacggtgaaaccctgtctctactaaaaatacaaaaaattagccgggcgtggtggcaggcgcctgtattcccagctactcgggaggctgaggcaggagagtggtgtgaacccgggaggcggagcttgcagtgagcagagatcgcgccactgcactccagcctgggcgacagagcgagactccgtctcaaaaaaaataaataaaaagaaagtagtaagtgccgtggaaaaaagactgggtgaagggtgtcaggagggcaggagggcagttttaaattgagtgatcagggaagatcactgagaaagtggcaattgaataaagccttgaagaaggtaagggagtgaaccatgcagttcttaccataggtaacagctggcgaagacgccctgaatcacaaatgtgtcctgtgtgttgtgtgaacattgaattgacttaagagtataggtggatggtggtgaccagaggggtccacccagagcagctaatacctttgggtggttttcttcttcttgctttatttttattttttgtattttctttcttttttgagatagtatgtcactacgttgtccaggctggtcgcaactcctgggctcaagtgatcctcccgcctttgattacaggcatgaaccactgcacactgcctactttttaatttttttgtttttttgagactgagtctcactctgtcacccaggctggagtacaatggctcgatctcagctcactgcaacctttgcctcctgggttaaagcaattctcctgcctcagcctcccgagtagctgggattacaggcacccaccaccaggcctggctaatttttgtattttcgtagagacagggtttcaccatgttggccaggctggtctcgaactcctgacctcaagcaatccatctgccttggcctcccaaagtgctgggattacaggtgtgagccaccgtgcccagccttttttttttttttctttcaaataaaggactggtgtggtggcacaagcctgtaatcctagctctttgggaggctgaggtgaggtgggaggatcacttgaggccaggagttcaagaccagcctgggcaatatgatgaaaccctgtcactactaaaaaaaaaaagaaaagaaaaaaagtggcactggccctaccttctaatagcttgcagtttagtcagtttagtttgcagaaatgacatagctattccttgaggctaatccgtaacatagaccataacacaaccatatacatatcataacatagtcatgacacagagttgctctgcagtatgatggcttgaaaagaacctggggttgggccgggcacagtggctcacgcctgtaatcccagcactttgggaggctgaggtgggcagatcacctgaggacaggagttcaagaccagcctgaccaatatgattaaactgtctctactaaaaatacaaaaattagccggacgtggtggcatgcgcctgtaatcccagctactcgggaggctgagacaggagaatggcttgaacctgggaggcggaggttgcagtgagctgagatcgcgccatcacactccagcctgggcaacaagagtgaaacaacgtctcaaaaaaaagaacctggggttgttctttgagagctggtccatgtcctaagtatagaaagaacttagaggaattggggtcactaaggaacagggtggttagggaagactttgaggggaggtctggagggctgggcaagtgttgattaaatggaggagagggtgggagaagaaagtgctatcttttggaaggttgaagtcaggatttagtacgtttgaagcgggagtctggcccacagtatgtcagggcttgaatgccagggtaaggaatatagactttgctctgtaggcaatggagagcaaaacatgtctgagaagcaagttcttggaattgggaagggtggatatatcaaaaggactggctgcagcactttacgagacctgagaagaggctatagttaccgtagcgactggtgtagtagttccttgcatgtcccactttcttacctggataactgaagtcgccttctaacctgtccctctctttgcactttactcccttaaaatccatttctactcgcagataaactgatattttaatttcaattttgttatgttaaatattagattttaaaataacctatttgttatcaatgcccaattatataccctcacataattaaattcctccatactcaggcatatatgaacatatataccagagtaacgtttttgttggggggtggggttgtttgtttggttttggtggctttttggttgtttgttttctgagacagggtattactctgtcgcccaggctggagtgcagtggtgcaatctcagctcactgcaacctctgcctcccaggttcaagtacttctcctgccccagcctcccaggtagctgggattacaggcgtgttccaccacgcctggctttttttttttttttttttttccctgaggctgagtcttgctctgttgcccaggcttgagtacagtggcacgatatcagctcactgcaacctctgcctcccgggttcaagtgattctcctgcctcagcctcccaagtagctggaattacaagcgtgcgccaccaagcctggctaatttttgtatttttagtagagacgggatttcaccatgttagccaggctggtctagaactcctgacctcgagtgatctacccgccttggcctcccaaagtgctgggattacaggcatgagccaccacacctggcctgaatcatattacttattttcttgaaaccctccagtggtttactgtttcagttggaaaaaatcataactccatcctatgtttcacgaggcctatggtctggtccctaccttccttcttcatttcctgaccctcctccttggttcagccatgttgtaccttattcgtgccaaacttattctttcaggtctttgtatttactgttccttgtgccaggactttgtgcccctgcccattttattgtcttttaatttcattttttattttttatttttaaattttttccaaatccctgccccactcccatttcattgtctttaaatagctagtgctttcttgttattgaggtcacagtccttggtgagcccctccccagtggctcagtctttgttagccattcacccaaagttgacagcaaacagttatcctgttttacttcagtcatagcatttatgtatttatttgtataaatttaaggggtacaagtgcagttttgttacatggatatattgcctggttgtgaagtctgggcttttttttttttttttttttcgagatggagttttgctcttgttgcccaggctggagcgcaatggcgctatctcggctcaccgcagtctccgcctcccgagttgaagtgattctctgcctcagcctcccgagtagctgggattataggcatgcgccaccatgcccggctaatattttcgtatttttagtagagacgaggtttctcaatgttggtcaggctggtctagaactcccgacctcaggtgatctgcctgcctcggcctcccaaattgctggggaagtctgggcttttaatgtaaccaaccatcacccaaataatgcacttgtacctgttaggtaattttttattcctcaccatcctcccacccttcccaatctccagtgtctattattccacactccctgtgtccatgtgtacacagtatttagctcccacttataagtgaggacatgcagtatttcacttcctgtttctgagttgttataacatttattactgtttgaataaattttgttcatttatttatttattgtatttcctcccctagaatgtaaattttaggagggcaaatgagtatattctcagcatctagaaccatgtctggtacatagatgcatagagatgctcaaatatttgttgaacgaaaatgaatgagagatatatgttgtcactgggggtaaagaagaggggagagagattaaggaaagaggtttactgggactgggagactgccaaggaagtagagcctattttcattagaagctgccgcctctactctttctctttggctttcatgttcctaccctggctgaggagtaagctatagtcattacagcacccttttctttttctttctttctttttttttttttttttaagacagagtctcgttctgtcacccaggctggagtgcagtggcgtgatctcggcccgccgcaacctccgccccctgggttcaagcgattctcctgccttagcctcccaggtagctgggattacaggtgtgcgccaccacacctggctaatttttttatatttttccactcctggctaatttttttgcatttttagtagagacagggttttaccctgtccaggctggtctcgaactccagacctcaagtgatcctcctgcctcagcctccccaagtgctgggattacaggcatgagctaccgagcctggcccagcacccttttcttgctgctacaaagactagcctatgagccttttaggttttcactgtttttaccatttaacttcatgagagattccaaaactagcaaagtttcaatcatggaagtcagtggatacttgggcgtggctgacagggagcagaagggctggtgagtggtagagccaatgcaggggctgaggtctccccaagccatgcattgctcagtccatggctgtggggagacaatgccatttgtaggaatggctaaacaccacctacattctttgtggtaaggccaacttgccacacatcaggaggacaggggctgtcttaaaagacatcacctggcctgccacacctgggcaccccctacccccaagtccccactgcgagcagcagccccagacatgaagaacaacccttgccctcttctcgcaggttgctatcggctggtggactatttggaagggatccggaagaattttgatgaggctgccaaggtgttgaagtttaactgtgaagagaaccagcacagtgatagctgctacaaactgggggcctactatgtgactggaaaaggtaaggagggcctgccttttgggtccttgtcattgatagcagtgctggcctcacacctgagccccatgataagctcttgcagaagggtctcgcaggcattgggaaagtgcattgtaggaagatggagaggtaggagttcagcagagtgatggggggaagaacacagcctttcaagttaggtaaaccttagggaatgctattggcaagtagtgggaccttgagccaatcacttcgactctgtgcctcagttacatcacctgtaaattggagggaaatagtacttgctttgtagggtggtgaggattaagtaggacagcataggaaaaggcatcagcatgtgcttggcacagagtaaggggtcagtaattattgtcttccttctgtcttttctccttgtactctaattgtagttatcactggcatagtgtttacattatctatggctaaataacaaaatagttatttttgttcacctcaatagtttctgtgggtcaagaatttgggagtggtttagtgggggtacctcagggtatctcatgaggttatagtcaagacattggccagggagccagggctggagacattggaaggcttgactgaagttggagtttccaattctaagatgactcactctgatggctggtagcagaggcctctagttccttaccagctgttattgggagagctcagatcgtcatgacatggttcgctccatgggctgcttgagtgtcctcatgacatggcgtctgggttcccccagagtgagtaatttaaaggagacaacaagatagaatccacagtgtcttctatgacctatctttggaagtcacacacttttcatttctatcacatatttattagatgtagcctacactaaggggaaggacttaaattccacttcttgaagaggaaggaatattaaagaacttatggacatatttaaaaccaccacaggccaggcacggtggctcatgcctgtaatcccagcactttgggaggccaaggcgggtggatcatgaggtcaggagttcaagaccagcctgaccaacatggtgaaaccccatctctactaaaaatacaaaaaaaaattagctgggcgtggtggcgcgcacctgtaatcccagctactcaggaggctgaggcaggagaatcacttgaaccctggaggcagaggttgcagtgagctgagatcgcgccactgcactccagcctgggcaacagagcaagactctgtctcacaaaaaaaaaaaaaaaaacacacacacacataaataagtaataggacctttgacaggcagcttttttttttttttgtgacaggatcttgttctgtttctcagactggagtgcagtgataaaatcataactcactgcagccttgagctcctgggctcaggcaatcctcctgcctcagcctccccagtggctggaactataggcacgtgcccccatgcttagctaattttttattttttgtagagacaggatctcactatgttgtcaggctggtctcaaactcctggcctcaagcaatccttgcaccttggcctctcaaagtgctagggtaaggtgtgagccactgcacctggccaaggatgtctttttttttttgagacagggtcccgagacagggtcccactctgtcgcccaggctggtgtgcagtggcatgatctcggctcaccacaaccccctggctcaagtgattctcctgcctcaaccttccgagtagctgggattacaggggcgtttgccactaccacccagctaatttttgtatttttagtagagatggggtttcgccatgttagccaggctggtcttgaactaacctcaaacgatccacccgccttggcctcccaaaatgctgggattacaggtgtgagccaccgtgcctggccccattttaattttttaaactaaattttaggccaggtgcagtggctcacttgagcccgggaggtggaggctgcagtgagccgagattgcttcactgcactccagcctcggccacagagcaagactctgtctctaaataaataaataaataaataaataaatgtaaataaatgaaaataaaaatgattctaaccttttaatattttttctaaactcttgatagccctagtggctcatttaggaaatgtcactatgggctagaaatattaatttgtaggtcagcagtttccttagtttcacttcagtttggttttcttctgataaattcaagtaaaatcaaagttaaattttttacttacaagtagcatttgtgatccaatttttccaaacacttctatctagtatccattcaaccagccagcatttaatctgaacacatgctacaaagatgactggaatggtgttcacttaatgataatgatggttatttctaggtggatttggaatggttacttaaaagaataatgttaaaatgtttatattttttgagattgagtaatggtacatggagatttgaagttttgcacacacacaaacaactaaaaaaagtgagccctgccaccacttctacttaaaattatttgttagtgatttcccattgtttttaagattaaattcaggggtcttaatgtgaccctgcatgatctggtccctgcttgcttgcctgccttgcactatacttttcctccatgctctttttacacttaaaatcatcttttttttttttttctttttttttttttgagacagagttatgctctgtcatctaggctggagtgcaatggcgcgatctctgctcactgcaagctccacttctggggttcatgccattcttctgcctcagcttcctgagtggctggcattacaggcccctgccaccatgcccagctcattttttttgtatttttagtagagatggggtttcaccatgttggccaggctggtctcgaactcctgacctcgtgatccacccgcctcagcctcccaaagtgctgggattacaggcgtaagccaccgcgcccagcctgatttttgtatttttgtagaaatggggttttaccatgttggccaggctggtcttgagcctcctgatctcaggtgatccgcccacctcggcctcccaaagtgctgggattacaggcgtgagtcaccacgcctggcctcctgtgtattttaaatcaattacttagaacaggggtattcaatctttttgctttcctggaccacattggaagaagagttgtcttgggccatatataaaatacagtaatgatagctgatgagcttaaaaaaaaaatcacaaaaaaaatctcataggccaggtgaagtggctcacgcctgtaatcccagcattttgggaggctgaggcgggcggatcatgaggtcaggagttcaagactagcctgaccaacgtggtgaaaccccgtctctactgaaaacacaaaaattagcctggcgtggtggcatgcacctgtaatcccagcattttgggaggctgaggcaggagaatcgcttgaaccctggaggcagaggtagcagtgagccaagatcacgccactgcactccagcctgggcgacacagcaagactccatctcaaaaaaaaaaaaataataataataataatttcataatgttttaagaaagtttatgaatttgtgttaagccgctttcaaagccatcccaggcccatgggttggacaatcttgacttagactatctaatacaatgtaaatactgagtaaataattgttctattttatatattttgtattttttaattgtattgttattttttccctaatatttttgatgtgtggttggttgaacccatggatatggagggcccactgtatgtttaaattaataaacaattaagtgcttgtcatatgccatgttctcactgtaaccccatgaggtagatattattatcattcccaattttcacctcctttacctgtttgagtttcctcataaggtatcatctgaataaaagattctacggctgagaaagctaggaggtctgtgcactatgccaggctacctttcatgctgcctgagctcatagtatggacatttttttttctttttgaggtaaagtcttgctctgtcacccaggttgatctcgaattcctggcctcaagcaatcatcctgcacaaagtgctaggattacaggtgtgagccactgtgctcagccttaaactttattcaggaattgttgttggccaggtgtggtggctcacgcctgtaattccagcactttgggaggccaaggtgggaggatcgcttgagtcccagagtttaagactagccttggcaacatagtgagatcctttctctacaaaaaaatttaaaaattagccaggcatagtggttggtgtgtgcctgtagtcccagctacttggggaggctgagatgggaagattgctttagccggaggttgaggctgcagtgagccgtgatcatgccagtgcactccagcctggttaacaaagcaagaccctttctccaaaaaaaaaaaaaaaattcactgactttggcctgagacatttaggttgtgccctggcttgggtttattttttcctactttccttcctctcaggtggtctgacccaggacctgaaagctgccgccaggtgctttttgatggcgtgtgagaagcctggaaagaagtcaatagcagcatgtcacaacgttggcctcctggcacatgatggacaggttaatgaggatggccagcctgacttgggaaaggccagggactactacacaagggcctgtgatggtggctatacttccagttgcttcaacctcagtgccatgttcctgcagggtgccccaggctttcccaaggacatggacctggcatgtaaatactccatgaaagcctgtgacctgggtcatatctgggcctgtgccaatgccagtcgcatgtacaagctgggggatggtgttgataaggatgaggccaaggccgaggtgctaaaaaatcgagcccagcagctacacaaagaacagcagaaaggtgtccaacccttaacatttgggtaatgtggtccaccctccctcccaggcaacaaactgcttgaggctggcagctcctgtttctgaagactgatgcagcccttgaaggtcaacctgctggagcaaaaaaacttgggacttgaatttgtagctccatttacatggatccattgccccagctactggagtatagcctacaatgtttatttcagtcaatattcctttatctgggtgttctgtacaatgtttattacagtcaatattccttcatctggatgttctgtgaagatagccatgtttatgggggtcttagttttcaaactctggcaactctgtgaaaaataggagcaaactagagagccctggagattggtagtagggaagggaggatagcaggaagtttgaaaaattagcagccccggggcctaaaggaatcagctgtcatcattttcatcattattattttggttaggatggcttgaaaatcagaacgtatcttggtttacgtaattgaggtcttaaagaactaagaacagttaaatagtcacaactaccaccctctgacttacataatcattggtgtgggcttcgttttgcctttagagtcacatctttcagtaaattcacagagatcaagagggacgtgcaacatacagcttaaaggctgttatgcttcagggttgctgaagaagatgaaacatcagcctgccatcgtctagaagagacattggcagttaaaaattagcacctccagtgtagtcgcctggcactgcccatcatgctgagggagcagattcttcccaaggcagcttcagctaggagtttgtaagcaaggactttgtgacacatttgtcccctggaactgagcctttttaactgtccctgtgaatgaacaattttgagtgacctacggtttgtgttaattagtgttctttccagattccaggtaccgtagagagtatgttctttgtggtggttgtgccttttaagaacatttgtggccgggcacggtggctcacgcctgtaaccccagcactttgggtggccaaggcgggtggatcacgagatcaggagatcatgaccatcctggctaacacggggaaaccccatctctactaaaaaatacaaaaaattagccgggcgtggtggcaggcgcctgtagtcccagctactggggaggctgaggcaggagaattgcttgaacccgggaggcggagcttgcagtgagctgagattgcgccactgccctccagcctgggcgatagagtgagactccgtctcaaaaaaaaaaaaaaatttgctttttctgttgtctccccagcttgtcaccagggggcgagcttgccatttccctgctggtaacaataccattctgtcaccatctactgttttaggcttccgtttt

SEQ ID NO: 6 - protein, 231 aa, Homo sapiens
MAGMVDFQDEEQVKSFLENMEVECNYHCYHEKDPDGCYRLVDYLEGIRKNFDEAAKVLKFNCEENQHSDSCYKLGAYYVTGKGGLTQDLKAAARCFLMACEKPGKKSIAACHNVGLLAHDGQVNEDGQPDLGKARDYYTRACDGGYTSSCFNLSAMFLQGAPGFPKDMDLACKYSMKACDLGHIWACANASRMYKLGDGVDKDEAKAEVLKNRAQQLHKEQQKGVQPLTFG

SEQ ID NO: 7 - DNA, 57396 bp, Homo sapiens
  5'UTR (1)..(80)
  exon (81)..(125)
  exon (20976)..(21152)
  exon (21846)..(21971)
  exon (22190)..(22327)
  exon (23226)..(23351)
  exon (23579)..(23640)
  exon (24381)..(24512)
  exon (26067)..(26258)
  exon (28825)..(29002)
  exon (29094)..(29255)
  exon (30297)..(30389)
  exon (32698)..(32901)
  exon (33007)..(33153)
  exon (33574)..(33661)
  exon (33997)..(34063)
  exon (34284)..(34410)
  exon (34496)..(34672)
  exon (38115)..(38282)
  exon (38613)..(38802)
  exon (40506)..(40620)
  exon (40775)..(40919)
  exon (41027)..(41234)
  exon (41422)..(41732)
  exon (42888)..(43087)
  exon (43237)..(43363)
  exon (44942)..(45043)
  exon (48754)..(48900)
  exon (49093)..(49251)
  exon (49853)..(50019)
  exon (52680)..(52874)
  exon (56236)..(56344)
  3'UTR (56345)..(57396)
gcggaggcggctccggcgcccgctctgcccgccgctgggtccgaccgcgctcgccttccttgcagccgcgcctcggccccatggacgccctgtgcggttccggggagctcggctccaagttctgggtaaggcgcggggctccggggtcactgcgcgggggccagggtcggccggcttcgcccggtccccgccgcctgccttcccgcggggccggcaggtatcccgggacggagcccctgagacggcctgggcgcccgggagggggcgatgggctcgggagggaggttggctgcgccgcccggagccgggtcccacgcggtgtcggggacctgccctgctctgcccttcccggctgcagcactggggagcccgggaaagtgaggaagagtgcgcggctggggcgcaaaggcacagtgcgtggctgggtgagtcggctccatcccagcccctccgtcgggtgcggaaggggcgtttcgcaatcagccgcgggttcctgatggagggtcttccctcagcatctgcctcaggttaggactcggttgcccacctgggcatggattgcccccagggcatccagagcacctgctcaaccaggtgttttgggaggccggctgtgcagtgtcccacccttcttaggaaggtttcctgccaccttcttttctctaggtaagactgaggtctgagagcaggccatccccaccactccggactcagaagggagaagcagaccccagtctggagacaggtgcagggtgtcaggattcctgtagtccaactcccttctcacagatggagaaagggaggcccagagagaggaagggacttgcccaaagttacccagttcaatgaaggcagagctgggatagaaaaacaggctacaggccaggtgcagtggttcacgcctgtaatcccaccctttgggaggcagaggtgggaggatcacttcagcccaggagttttagattactgtgagctatgatcgcaccactgcactgtggcctgggcgaaagagtgagaccctgtctctaaaaaaataaataaataagaaaagaaaatcaagcctttggtgactctcactccaaatctctttctaagacaggctgctcttcagcctgctgactccagcctccagcacagttcaggtgagctaagtgcatacagcctaggagctttcttaccaacttgcaaaacttacttgcctctatgaggcaagtgatcatgtggtctccgttttacagagggagctcagattaaaggtgcttctctgtggtcattaaaggggtgtccagggcttgtgaatcccaatctctaagtcttttcctattttgagtatttgtacatatatgccctttgtgtgtgtacgcacacacgcaggcacgtggggtgttacccaagagttcgtgctgtgcacgtgtgtgcacaggtgtataagtctggagctatgctcttgggctgtgtttagaatgggctgaaggcgttatatggattttttgaaacttggggcaatggaggtaaaaaaaaaaactgtaaaaaggcatatttgggattctctctttttctgtgggtgacccaaaggttaatccgagatggtgcaacttctctgccactgcccttctttcccagtcccacaggaacttcatgtattattcagcatggacaggccacttgccaccagggtccagaggttgtgcctttgcctcatgagcacacttcctttcactgccctttgggccaggctggtatgaccgtggcaggtttgtggtgcctgggatgccaaacagaaaatcaagagggtagttgtgcccaagcttcaggcacaagggctcattgttcctgggtagcctcctgaaccctgagagcttaggactctacagagacaggtctcctggaccccagagttgggaaattcaggactccctttttgtcccatgttcagacatcctctggctctaccttaacatgggattgtggaatccaagaaagtgggagcttgggagtttgaagcagcgagtccaacccctcagtgtagagctggggaaactgaggccaagggagtgaaggtcacaggacaatcaaagacagagtgctgggctgggaaaccggaccccggggctgtggttacagggttgccattgcctggctgtgagcctttgagcctctgggccctctggcccgcgcacttctccttgatgctcgtgagctatacacacctcctctgaggatgcaggctcagtgggagtcagctcatctacattatgaagccctcgtgagatctctgcttggataccttaaatggcaaactgaccaccccccttcccaccccaatctctaaacatctttcacattctcttctggctcctgaaagctgttccaggctgcacccagtgtggctggtgactggggaaggagcgtggagagagaaaggaggctcccagctcatcctctgagggaatgacagggtttgtacagctgaaaggagagagagtctacactggaagctggatcctctgccacagcctaattacaaaaaaggcctggagttctgggctgttcatttgtgatgtgctgtgttgcatctcatttgcatggtgtattattaaggcacaactccccctgaacctttaccttaggggcctgtgggtgacccactttgtgggaagtggttcagggcagcccggaagtacctgaactaggagtgaaaatgcaaggagggggtggggtgttcaggcccctctgggccgctcatttaatctaccaagatgctcagtagctcatccttatagcttcagtttctccaccagtggaatgggaaataacccaacccctacccacctcacaagatttttctgatcaaatgagacagggaatgtggaatgattttaagaactaagaagttttctatgggtggcaagttctgacattccccggaagagggaggagaaagaaaaatggggttagaagaaaatgtcagacgtgggaagacctgcagggaaagagctggtagggctgtcgggccagtggctcccatttcagctgtttgctggggagctgggagctgttcctggctcagtctgagggtaggagactggagaggaccatgccccttgggacatgtgtacacacatctgtgtactcacacaccacctgccaggtgaatgatttgtgtgaatccttctctctctcacccatatcgactttgaagcaggttaccaacttccctgaatgtgccttgggagtttttgtggaaataaattccaaaagagtgaactgtgtaattaaaccacctcactactcaggaggccagaggtgcctcagaacaagggaggaggtgggatcctctgcctgcaggattcctctctgttctgaaccacagaggttgggagcacctgggtggtgaagggagtatgtggaggaagggcctggaggtatttaccccccgccagataaacacctgttggcagaattagccttgatctgacagccccaggaagcttagaaatctgaagatcctgaccatgaaagccatccaaagatggcaaggaccgcctgagaagtagtgagctccctgtcactggggggtatgtaaggacatggttagtgactgcttggcggagatgctggagagaggattcaagccaggaaagaaggtggggtcctgagattctgtgactgggtagagggaagatgcggccagtggggattcattagttcctcctctgagatttctggactcctccttccctggctctctccctgctctacatacggaatttgcctagaagcagctcttggtagaggcctctgggtctccccttggttaggcccacatgggaaaggtgacctcattgttcccttagctgtttacccatcctagggaggggcagatccctggtcccttggaggctcagctccctgtgtctcctgctctgttttagctagccccaattctgctattcaccagctgtgtgactttgggcaaatgactcaccttctctgggctccagcagggctgaggtgggctctggggcctgcttcaggtctggagttgcccaattttggaaggatgagccttgggcttgggggcgaaggctatgcatgattagggcccttcaaagcttagagctcctgggtatcagggtctcctctgccttcttagtaggcagccacaaaaatgtatgagtaatgggcaaggctcctatgccaatgtattttgactcacaaatgaagacagtgtcctgcacatccatggggaagctgagtgggaggtagacactcctccgcttagcagacaccatagctcaccctcccctcaggaacccagtcctccctgcaaggccagagctcccggggctcctttcctccatctcagctgctgcaagcaaacccagtgctggatggctttgacctctgagctcttggcttctggctacggcatttcattgcttgtggcctcaggctggcttctcctcaatcctgctgttcccccacttcacctgggccttaggtccctgagggccagagagatacggggaaggaagtgagtcagggaagtggcattcaggagggagctttgccaagcccgcctgtagtccccagacagggaaatggtcttgaaacactgggcaggcttccagggaggaaggacttggcagggatgaccagctgagccaccccggagtagggccagagcacccggactgtattcagtcctctccattggggcaggatccctggggagttgggggtgaaatgagacctggtatgccattgctggggtggctgggcccctccccttcccgaactgaagttgtttctgtttctggtactgcggtgcagtggttggggctggcagggggcagggtgggatagtgaatgagagcctaactctaggcttggattttggatttctccttttttttttttttgtgacagagtcttgctctgtcgcccaggctgaagtgcagtagcacaatctcaactcactgcaacctccacctcccaggttcaagcaatcctcctgcctcagcctcccaagtagctgggattacaggtgcacaccaccatgcccggctaatttttgtatttttagtagagacggggtttcaccatgatggccaggctggtctcaaattcctgacctcaagtcatctgcccacctcagcctcctaaagtgctgggattacaggcgtgagccaccgcattcagccagatttctcctaactggatattcaggtttctagtcaggggctcccagaaccccagctaggccactacccaggtgttagccgctctgctccctcagctctgtgagaataattgcaaaaagcaggtgatatgagaatgggctgcatggctgaaaggtgatctgggtgcaagtgctctatccccagggtgggacatcatgccggagtcctaccaggtgtacaggaaacactaatcctgtgggaaggagctgggccctggaacaaaactctctgggtctaatcccagcatcagccctgggtgtcagctgtcatgagcgtgaaatgatcatcctggcccacagcaggagctcagtgaaccaaagccccttccagaagcacattggccagttgagcccgtgagccatccctgcaaggggccagcaggcgcagcacaaccagtttttgtttgtttgtttgttgtgttgtgttgtgtttttgagaaggagtctcgctctgccaccctggctggagtgcagtggcgtgatctcagctcactgcaacctccgcctcccaggttcaaacaattatcctgcctcagcctcctgagtagctgggattacaggcatgcgccaccatgcctagataatttttttaaatatttttagtagagacagcgtttcgtcatgttggccaggctggtcgcagactcctgacctcaggggacccaccctcctcggcctcccaaagtgctgggattacagcacagccagtttttgacccctgcccccaggccttccaaaggctgagggagggtgagtggggatcagcacgtgtccttgctctctccacgccttcattgctgctgagtcaatggtcttgtctgttcatcccttccctatctgggacttcaggagctgccctgcagtggtggcttccttctccagtaccacacaggaatagggaagtaatgactcttctcatgacagagactgtcaacaggcctggggcccccagggcttgggaagtccctggcaaagctggggcagagggctccggggtcctcaccccccgcccccatcgcctgtatgagtctgcagtgatttcagcttcagtgaccatgaagtctgccatgagggggcctctgccacgtggtccattctggatgtgggaccttaccccttatcagccccatccagctgtttaatcgcattattaaggaagctgttgttgctgtggaaactgtgtgggtgatggtgggggagggggctgtgggctcagctctcacctcccagcagtgctcttcagagcgggaatgagaggagagccttgagtagggatcgtcatcctgccctgcagggattcagggagtgttacagggtccagggaataaccttcactggccctgtcctcaccttcattttacacataactgagttggagacccttctgggtgccaagaactgtggccttggtaccagggagagaacactgtgttcctgggcatgaagctgcagaggctgcggctggagttggcaccctccatttatctattcatttgtttattcattcttttgttcaatagatggttattgagtaccttctctgtgccaggccctgctctaagcaacaggaaataccatcaactgcagaatacagagctaaagaatctgtcttcgtggagcatatactctagtgggaagaggcagtaaaacaagaatcataaaggccaggtgcagtggctcatgcctgtaatcccagcactttgggaggccgaagcaggaggatcacttgagcccagaagttcgagaccagtctgggccacatagtgggaccccatctctacaaaaaaattaaaaaattagctgggcgtggtggcacatgcctgtagtcccagctactcaggaggctgaggcaggaggatcgcttgagcccaagaggtcaagattacagtggggaaaaaaaaaaaaaaagaacagttgaatgtggcactgtcatgccgttcaacctgtaatttgaaggtagaatggacagggtttgctgagagaccggatgtgggatgtgagagaaagagaagaatcaggggcaactccaaggactctggtctgggaagagagacaggaggaaggaactgccatccccgggccaggcaggctagaaaggcagggacggccaagagctcagttctggacgtgttttgtatgacgtgtcccatagttgatgtcctagctcagggtctggagtgaaccaaatagggagttaggggtgagggcctgtgtgggcgggtaccccctgcctcctagggagggccctgcccaggtgggacatgcttatctcaaggaaaggagcccaggctgaatgcccttgagggtcaaagcagccacccagttctcacagccccaaagtcccctggttgttgccacagagcaggtgtctgcgaaaccaaaacacgggcctgacagctggaggctccatcacccgcttccctgagtgttgtcccgttgccatcgaagtgctttgctgttcattctccctcaccttctccccgctgtggggaggtgaccagatgctgtcatcactcccattactcacaggtggagactgaggttcaagggcacgaaggggctcaccaacagttgcatggctcaaaagtggcagaagccatcctggattctccgcatcggggttgggttcttcctgtggccactccccacccgccttacagagccatgccaccggcctgcaagtgcacacagcgattcccaccatgtccccacgcctgggctcctgtcctcaacatgcacactcccttgtgagtcaatggccccgtgtggcatcacaaagcctgggtgcctgtcccggccacacactgctgggtgtccttgaacctgttgccaaagtgggtgtagtttctcttttgtacactgggcctaacagtgcccctcctatatacccctggaagttgttctgagacaacatccagataacaactaggtaagtgcagtaataaaatgcgggagaaacattaggggcctttattttcctcacttaactggctgccagggaaaagcaaggaaaggtcagaggctggggtgccccagagaggccccatgtagatgaggctctggctgggcccagagaaatgggatgtacactccggcccagagacctgaagatctgggttcagggcagctttgggacaggctatctggatggcaactaactggagtacctgatcaggcctagaggtgtgtcctgtgacccagtgtccaggcctgggccagcatgtcagagactcagcaagagtatgtgggtccttggctcacattgtttgagcaactactgaatactgaataggactactgaatactgaatactgaataggacaagatgtacatggtacaacttctgcccacctgggccttcaatgaaatgcccccaggcagcatgtccctgactgcatgcttcacagagcagggataggcctgcccaacgtgccactgtatctgcagaacccagcccactgcctgactcaccaaggccctcaccaaacattgtcaaggccaagagtgacgctccagggaaggggatctctctaggaggaagggtgctcaagatgaagaaggtgggttttcagccaggcctgtcacccctccctggagtggttaggttaggattttgacaagtggtaaaaagagggactaggttgagcaagggggtaggagcaagaatctcagagcagatttaggatgaagtgagttggctgtgggggaagggagcaatgggaaaggaggtgggaggagatgccatggggggggtcttgaggaccaggttgggtgctaggatgtggcttcatgagcagcaggagtcactgcaggtttgtgggcatgaggcaagaggcacaaagctgtattttgggaagagccatctcgcaggtgggcaggggcactggagggcagagggctgccccagatgggattaagaagggaaggcaggccaggcacagtggctcacgcctgaaatcctggcactttgggaggctgaggcgggcggatcacaaggtcaggagttcgagaccagcctgaccaacacggtgaaaccccgtctctactaaaaatacaaaaattagctgggcgtggtggcgggcatctgtaatcccagctactcaggaggctgaggcaggagaatcatttgaacccgggaggtggaggttgcagtgagccaaggtcacaccactgcactccagcctgggtgacagagccagactccgtctcaaaaaaaaaaaaaaaaaaaaaaggaagaagggaaggcaggctggggaggttggggaaaggaagcagggagtgcagatcactccccttccatgagttgttttcttaagatgctagaacttggccaggcatggtggctcacccctgtaatcccagcactttgggaggctgaggctggcagatcacttgaggtcaggagttccagaccagcctggccaacatggtgaaaccccatctctactaataatacaaaatttagctgggtgtggtggtgtgcacctgtggtcctagctacttgggaggctgagacaggagaatcacttgaaccctggaggcacaggttgcagagagctgagatcgtgccactgcactccagccgaggtgacagagtgagactccgtctcaaaaccaaaacaaaacaaaaaccaaggccgggtgcagtggctcatgcctgtaatcccagcactttgggaggccgaggtgggcagatcacaaggtcaggagatcgagaccatcctcgctaacacggtaaaaccccgtctctactaaaaatacaaaaaattagacgggcatggtggcgggcgcctgtagtctcagccaatcaggaggctgaggcaggagaatggcgtgaacccgggaggcggagcttgcagtgagccgagatcacgccactgcactccagcctgggcgacagagcgagactccgtctcaaaaacaagcaaacaaaaaaacagaaaacaaaaattagcctggcgtagtggcatgtgcctgtaattccagctacccaggaggctgaggtgggagaatcgcttgaaccctggaggcagaggttgcagtgagccaaggtcgcaccactgcactccagcctgggtgacagagcgagacttggccttaaaaaaaaaaaaaaaagaaagaaattaaccagccgtggtggtgcacgcccgtaatcccagctactcagaaggctgaggcacgagaatcacttgaacacgggaggcagaggttgcagtaagccaagattgtgccactgccctccagcctgggcgacagagcaagattccatcaaaaaaaaaaaaaaaaaaaaaaaaaaaagatgggagaactcagaactcaagcatatagattattcaacagttcacatagccagatagttcaaggccagctgtgggctttgaatgccatagtaaaatgtttgaactttgccttctaggcagtagggagctactgaaagtttaaagggatggtatactattattctttcattcatttattcaataaacgtgtatgtgtgtgtgtgtattttttttttaagagtccaggtcttgctctgttgctcaggctagagtggagtggcataatcatggctcactgcagcaacaaactcccgggctcaagagatcctcccgccttagcctccatgtaactgggactacaggtgcctgtcaccagaccaggctaatgttttacatttttgtagagacagcgtcttgctatgttgcccaggctggtctcaaactcctggcctcaagtgatgctcctgccttggcctctcaaagcactgggcaatgtccctggtcttcaataaatatttgatttatttaagcaaatcttttttctgagcacctactatgtgctaggcaccattctaagtacttaggatacatagataaataaaataaaggttcttcccttcaaagagcttacatgtcagcaagtaaaggaaaagatgagagaaaatataataaatcagtaaattatatatcatgtcaaaaggtgataggtgttatagagaaaagaaaaagcggagaagggtgggagaattgggaatacaggggtgggacacaggtggcagtattaaacaggatggtcagggtaggcttcattgagaaagaaagacttcaggatgtctgggggaggagtgttccaggaagagagaagagcaagtgcaaaggccctgagacaggagcagcaagtgcatttagaaacagcaaggaggccagtggctggagtgaagcaggaaaggcggggagagggtcatgggttgggggaagggacattgtgcaggtctatgcaggctattgtagggtgtatggagtgaagatgtcaagtcagcagttagatatggagctggagatttggggagcaatgagctggagagatagacttgaaagtcattggcatatagatggtacatcatatcatcatatgagactgcatgggattgccaagaggttgagtgcagataggaaggaggcagagaagaggaaaggactgagctccaggaccctcttgcaccaggcaggggaatcagcaaagagactgtgatggcatggccagaaaggaaggggaaaaccatgcaggatctgggaccccagggaatctgaagggaagagaccagaagtctatggcaattgctcatgaagagatgagggtctggccaaggggccaggtgggaggaaccaggtaagagatattatcatcccaatgttacccttaaagaaaccaaggcccagagaggggagaggttaagaacctgggtcaagatcacacagcttaagtgtgacttcttctttttattttttatttttttgagacggagtctccctctgtcaccaggctggagtgcagtggcacaatctcagctcactgcaacctccgcctcccgggttcaaacagttcacctgcctcagcctcccgagtagctgggattacaggtgcctgccaccacgcccagctaatttttgtatttttagtagagacgggatttcaccatgttggtcaggctggtctcgaactcctgacctcgtgatcttcccacctcagcctcccaaagagctgggattacaggtgtaagccattgtgcccggccaagtgtgagttcttttaagctgtgtgaccttggccaaggtgcttaacctttccctgccaagtctcaaacacctctttgtccagctactatgcttccatcaagaatcaataggacctatgtccctacaggtgtcagggtagctggcagaatggtgatgcccttggcagaggcaggcaaggccaaaggaagggctggttctggcagggagtgaaggatcttactttgagaggtattgaatatgaggtggctgcagacagatggtgacgccatctgagaggcagcaggaagtaggcgctgaggctcaggaggtgatttgagctgttgatctggatttgggactcctcaggacaatctgtgaacaatgatgagagagagcaccaaggaccaaggtctgaacttgggagctagggcccatgtccacagggtgaactggaaggaagataaggagacagcaaggaatgcttgccaagaaaccaggagaccaggaaagagtagtttccaagagatgggggaagcccacactgttgcagggaggtcctgcataaagtctgaaacgggtctatttaattcgcccttggaggctgggcatggtgtctcacacctgtaatcccagcactttgggaggccaaggcgggtggatgacctgaggtcaagagtttgagaaccagcctggtcaacatggcaaaaccccgtctgtactaaaaatacaaaaattggccgggcgtggtggtggaagcctgtaatcccagctactcgggaggctgaggcaggagaatcacctgaatcccagaggcggaggttgctgtgagctgagatcacaccactgcacaccagcctgggagacagagcaagactctgcccaaaagaaaaaaaaaaattgtagttggaaggacttctggttctatagggtggattgaacacaagactttatctccagtccttcctgattttccatcaaagtgacagtaaggaataaagaatgtaaacctacaaggacaaagagaagaggagacaacagcagacaagatattaacacctttttggaaagtgagaaacaggttgaggagtgatcactgacacagcagagaacaactgaaaccaaaggccatttggagtctgtaaaagctcggggattggagggctgaaggaggcaaggggaagagcagggctgaaagcagcggctgctaggagaatgcataaggagagatgaaacacccaagatacttatccatctcctctcaaagccaggcaaattccagccacctcacagaagaccagcagtttattctgtggaattaagtaaaagtctgcatactgaaggatagaaccctcagccctcactcctaaattggtcccagagaaaagacctccagattcttccagttgttgggggagtcttccctaaaggaccaggttcctacttgatcactctgcagtgaagcccaacagccaataagcttggtcctcggtactctgtcttcagtagctgtttcttggtccttggtccttggtactctcactcatcattgttcacagattgccctgaggagtcccagatccagtcccaaatccacctgcccccaacacacagagcagccaactctttagtgtcttactccaaaatattgagacagccaagccgcaagaatcaccacaggtcgggtgcagtgactcacgcctgtaatcccagcactttgggaggccgaggcaggcggatcacttgaagtcaggagttcgagaccagcctggccaacatggcaaaacccctctactaaaaatacaaaaattagctgggcattgtgacacgtgcctgtaatcccagctactcgggaggctgaggcaggagaatttcttgaacctcagaggcagaggttgcagtgagctgagatcgtactaccacactccagcctgggcgacagagggagactccatctcaaaaaaaaaaaaaaaaagtcaccacacatttgaggaaaaattctgttaaaataaaaactttagacaaattaaatttagcagagtttatctgagcaaagaacaattcatgaatcagccagcatcctgaaccagtagaggttcacagagttttaccacccagcagtatgggcaggcagtattaatggacagagaaaggaattgatgtatagaaacagcttgattggcgacagatcagtatttgccttatttgggcatggtgcaatgaggtgtttgccttatgtggacatgttctgatgatctggcagcttgtgattggctgaaaattctgctatatttggctgagacttggctgcttattgtaagaatatactctcaagttacgttgcagtttgtttacatattgaattatgctacagtccactatgtatggagtcagctttatacctgggtgacagagtgagactttgtcaaaaaaagaaggagaggagaggagagagaggagagagatgaggggtggggaggggaagggaggaaaggagaaaggaaggaaggaaagaaggaagggagggagggaagggaaggagggagggaagaagggaaagaaagaaggaaggaaggaaggaagaaagagagagagagaaaggaaggaaggaaggaaataggcaacacataaaataaatttttttaataggatcacaggtcactgtgaacaatagccgttcattaaatgacttcggaggcatatacaaaaagttacatagttgtagaaaaagcttagctgttttaatagcgagttctcagttttcttaagtgatcaaaaacctaacaaagacagcatgaagcacaggaaattatctgggtagaacacagaatctttgttttctaggccaactacctaaagagaaagaaaaacattttacaatttcctattatgatcagaccaataatctaagaacaccatgttgttttaatggagagaaccaaattctagttttgcatcagtgtaattttgatattaatgctagctcttatcgcccaggctggagtgcaatggtgcaatctctgcttactgcaacctccgcctcccgggttcaagtgattctcctgcctcagcctctcaagtagctgggattacaggcgcctgccaccacacccggcttattttttgtatttttagtagagatggggtttcaccatgttggccaggctgggctcgaactcctgacctcaagtgatccacccgcctctgcctcccaaagtcctgggattacaggcgtgagccactgcacccggtcgctaacttttattcttaaaaaacttgtaaataattacctcctaatcttaaccagcttgatcacccataaaatttctttcacaagattcatcttccacaaacctcctacaactcttatatccattcactttttgtcctatactttcctcttctcattttcgaaaaatcagtcatttcactttaggacaaaatttattctctttttccgttatcaaaacaaaacatcctcacgtcttatagcttttccttagcttcctttgtatatttctttttcatatattcctttttcttaccttccttgtatattttcatatagattttcccccttattgtttctagtaattgtagctacatatattaattagaattcttaaccccggccaggtacagtggctcatgcctgtaatcccagcactttggagtccgaggtaggcagatcacttgagggcagaagttcaagaccggcctggctgacatgctgaaaccctgtctctattaaaaatacaaaaattggctgggcgtggtggcgggcacctgtaatcccagctactggggaggctcaggcaggagaattacctgaacccaggaggtggaggttgcagtgagtcaagattgagccactgcactccagcctgggtgacagcgcgagactccatctcagaaaaaaaaaaaaaaaaaaagaattcttaacccttagtgaccttaatttccatggacattagaaagtaagcatttgtgaattgtgtgtcacaccagctgtagattggtaaatctatgaaccataatgtctagaagcatgagctttctcatagtacaatttgtcagtgtggcacagaacatgtttctcaatggtccaaaatgtctttaagtctctctgtaaaaataaactgtaaaggaggcaaaatttcatttgtatccctttaggttttttgtttgtttgttttgtgaggcctgaaaactaaattgttgtttgtacagatttccctcctcctcaactttctattcttgatgctaagagtgttaaaaccttctggtggctgagcgtggtggctcacgcctgtaatcctagcactttgggaggctgaggcaggtggaacacttgacctcaggatttcgagaccagcctgggcaacatggtgaaaccccatctctacaaaaaatacaaaaattagctggatgtggtagcttgtgtctgtagtcccagatactttggcggggctgaggcgggaggattgcttgagcccaggaggcagaggttgcagtgagccgagatcttgccacttgcactccagagtaggcgatagagaccctatttcaaaaaagtaataataaaaccttctggtataggaaggacatcttttacatgggaattttatcttacattcatttaactcacttattttcaacacttatgcttggattgcctataaagatgagataataaacaactagtcatcattttgtttttcttgctgacaaattttataatataaagacaacataagcttgttttaccagtaaacctagataggaaatcatgcatctttatgatatttaatccccaaaactatgaaaacatgtctgtttcagtcaaaccaacaatattcttatttgccaaagattacccaagtcagatgagctgcaaaagtatttgaggtagttcttaattttctgagagaatacttcatttatacaagcacttatttttcttaaagccaacaaaatagagctctttcataatttaattttggagcattaaaaggagataagaaactatgatacctgtatcatacatacagacttatataaacataaacagcaacagatcttacagctttcatttaaatatcttagccatgttccaggtacagtaatataaaactcctgaatttattaaagactatctggatccaaattgttcttctggccaatggaacaagatttcttgcccagatgactaaagcttttgaataagattcgtgaaggagcttttaagatttttttgtttgatttctgtaaggaacctattataaagaggcaattttttattcatttaatcttttagatgcctctgtgtatcaattaaagaatgcatcccattgcttttgtggcatttttgaacctttcttttctaatgcaccttgcaagtgaacagttttatctaggtcaaaactttcccactgtggccactgtaactcttaagttgtcctcagcaaagttaacccatttttccaaaaatacacatgttcctcataattgttgttcatgaagttagccaccgtcccagaaagtggcgtctcagactctggagtcccagactccttagatttggaggaactcactttcaaaaggcacctgcctgaggcttttaactggatccatttcagttaattatcagatctgatttgctcctggacccagtcctacttgacccagtctaagaattgttcaaataaacttggagaacacaaaacacaaattcctgaagcttggaatctgagatagaactcacccatgacctccagttgctacaagagaacaattggcacagtgtgccctgtcaggtacccttacttggtcactaaatgctcctgagggtcactggagttctacttccgatcccacttctgacaccaatctgttaaaagaaaagctttaggccgggcacggtggctcacgcctgttatcccagcactttgggaggccgaggtgggtggatcacctgaggtcaggagttcaagaccagcctggcctacatggtgaaaccccatctctactaaaaatacaaaaattagtcaggcatggtggtgggcgcctgtagtccaagctactcaggaggctaaggcaggagaattgcttgaagctgggaggtggtggttgcagtgaaccgagatcacgccattacactccagcgtgggggccaagagcgagactgtctcaaaaaaaaaaaaaaaaaaagaaaaagaaaaagaaaaaggaaaagctttagacaaatttagcagagcttatttgaaaaaataagcaattcatgaattcagcagcatgctaaactagtaaagactcggctgggcgtggtggctcacacctgtaatcccagcactttgggaggctgaggcaggcagatcacctgaggtcaggagttcaagaccaccctggctaatatgatgaaaccccatttctactaaaaatacaaaaaaattagctgggcgtggaggcacacacctgtaatcccagctactcaggaggctgaggcaggagaatggcttgaacctgggaggcagaggttgcagtgagccaagatcacaccattgcactccagcctgggcaacaagagtgaaacgccatctcaaaagaaaaaaaaaaaaaacctaaaccagtaaaggctcaaagaactccacctaaccatgtggtcaagtagtacttacagagagaaaaaaagtgacacatagaaatagcctatttagaactcggcatttgctttatctggacaggtctaagcactttgcagtctgcgattggctgaaagctcagttgcaatgattggctgagactcagctacttgttacaagaaactctcatgttaggtttgtttacatattaagttgggtttcagttcactatgtaaggaggcagcttaaggccaaatttaatctaatttaacacctccagcttgaaagacaaaaccaaaccaaatcaaccaagaaacagaaaaaagaaaattcaaagatgtatgagcatgcataactttgataaaaataaaaataataattatttgaattggcaattagaaaatagttatatcctcaggtaacagatgtctctaggtggatgagattgtgggtggtttttcttgttgttgatattttctgtgcatctctaaaaaacatctaatgctttgcaaagaacataagaaacagattagtacattagtggccttggaggaaacaatctcagtaaaacatgtgtttattaatgaatgtattcccccatccctttccaaaaaagttcataggtgtagttatagtcaaaggtaagaggcagtcttgtcagagccagtaaagtaaccaaccatcctggtttgcccaagaccaagcagcttcccaagacactagactttcagtgctaaaaccagagaagtcccatccatactaggagagttgatcactctagtctgtgtaatttgcaaagactctccatatcctttggttcctgtgagtctcaaatccacccagtgaggtacaggtgggccggtggatggtcacctccatttcagaagagaggcagctaaggctcagggaatctccctatccctgacccgggaaaggccttaagagaaagtggtcttttaaactgtgtgtatatatcactttgataaaattaaaaattagttttaaagaagagagagggccaggcgcagtggctcacgcctgtaatcccagcactttcggaggccgaggcgggcaggtcgtaaggtcaagagatcgagaccatcctggctaacacaggtgaaactccatctctattaaaaatacaaaaaaaaaaaaattagccgggcgtagtggtgggcacctgtagtcccagctactccagaggctgaggcaggagaatggcgtgaacctgggaggcggagttttcagtgagccgagattgcgccactgcactccagcctgggcgacagagtgagactccatctcaaaaaaaaaaaaaaaaaaaagagtgagggccaggcgcagccgtcacgcctgtaatcccagcactttcggaggccgatgcgggcagatcacgaggtcaagagatcgagaccatcctggccaacatggtgaaaccccgtctctactaaaaatacaaaaattagccaggcgtggtggtgggcgcctgtagtcccagctactcaggaggctgaggcaggagaatcgcttgaacccgggaggcagaggttgcagtgagccaagatggcaacactgcactccagcctggcaacagagtgagactctgtctcaaaaaaaaaaaaaaaaacaaaaacaaaaaaaaaagagtgggaatccagaatgatagaaagaaaatgagcctgggagggatgaactgcagaggaccataaggtaacatgggagcagttttgcaggtgtatacaactgtcaaaactcactgattgtacactttaattgggtgcagtttttgttgcccttaaattatgcctcaattagagagaaagagagagaatataaggaaatgggggcagccatggcgtccttggagaattcacacttgggacgacaactgctcatttgtgtactctctcctcctcacctgtcttccactccacccctgtctctgatggaacatctctccagctaagccatcttcctcaaggcagcccaattctctgtggggctgccacagcactaaactgttctctgtgtccccaggactccaacctgtctgtgcacacagaaaacccggacctcactccctgcttccagaactccctgctggcctgggtgccctgcatctacctgtgggtcgccctgccctgctacttgctctacctgcggcaccattgtcgtggctacatcatcctctcccacctgtccaagctcaagatggtcagtggctcagggatctcctaccgatggggctgggccctggggattctgcttttattttttaatttaattaaattaattaattaattaatttagagacagagtctcactctgtcgcccaggctggagtgcagtggcatgatcttggctcactgcaacctctgccttctgggttcaagcgattctcctgcctcagcctcctgagtagctgggattacaggcatgcgccaccacacccagctaatttttgtatttttagtagagatggggttttgccattttggcaggctggtctccaactcctgacctcaggtgatcagcctcccaaagtgctgggattagaggcatgagccactgtgcccagccagcattctggttttaatgaggccctctcccacctcctcggctggactgggttccccagtctcacctgacctgcttggggtcatgggaatctgacaactgagaatatatacagccagctgacatattccccacttgggaaagtttaagtaagttcagcaacactctccccacctccagcaagcttctggtcagctccattcccagacctcagtgccagtcccaggcaggtctagtggattctggtggcttcaggtacaaagaccccttcccagtgaggactgtccttgcctctggggatgcggattccaacctgtgctctcttcgcaggtcctgggtgtcctgctgtggtgcgtctcctgggcggaccttttttactccttccatggcctggtccatggccgggcccctgcccctgttttctttgtcacccccttggtggtgggggtcaccatggtcagtgtggggccctgggaaagtggatgggggaggtctccattgggttgtggactgtgatagggaaactgtgggctctgaggagagggctggacatattgggaatgggaagaagaagggggtggccccagaaacttctggccatgtgggatggggagaaatggaggcaggtccagatgtgtgtgttctgcccgggcctccctgccctccctgcacagctgctggccaccctgctgatacagtatgagcggctgcagggcgtacagtcttcgggggtcctcattatcttctggttcctgtgtgtggtctgcgccatcgtcccattccgctccaagatccttttagccaaggcagaggtaaggttgggggagaggggaacctgccaggtttagccctgataggagggtgacctcagggttcaaagtcactgctgggtcccaggtccctccctcgaggcttcaagtacaaacacaattgtgttgttctccacttgctacatttctacctggaagcaggctgaggagggggcaccagtgtaacacaggaatgagccaagatgccaccactgttggaccatcatgtgagggtagggggctgttccacagcacccacccaccaagtgcaatatctgacgtgggtgtcagtcagtgcctgtgtaatgaacacatgtatgcagacaagtgtgaagagttctggcttacctagaggtcccattagcatgttcccttcctttcttcccacctccctcagttcctggccttcctcttgatcttcagtggctgtgatgttgggctggtgggatggaacactgcaggccaacctagtgcctcccatttctccatctcagcgggaagcaggcaaggagagtagcaaagaacataggctgtgaacaacccacttactccccatgtgggctcgggcgggtcgctgaaacctttggagcctcatttccttaattgcagaaagggcgtcatgagctgtcctgcctgtaggctgatgtcccagttagacaaggtcatgtaggtaaggtgatggcaccacacctggcacaggtgccacacctggtcctcgctgaaccagagctcccttgtgatccttcctcatctctcagagtcctctgagtggggacctggaggcccccaggtgctgcctcctgccccagaggagactgatgccccaagggactccgcagggcaggggctgcaggcccaggcttttccagtgcttctgacgcccctccactctcccacccagggtgagatctcagaccccttccgcttcaccaccttctacatccactttgccctggtactctctgccctcatcttggcctgcttcagggagaaacctccatttttctccgcaaagaatgtcgaccctgtgagtttcccatggagggtgcgggggctccacagctgagtcctcagcccaactctgaccagcagcccccaacccctccagttcctttcaaagtgggagagaggtcatccccacaatctgtaaactggggcttggagcaggaacaagggtcccctccatttccctactctgctttgagagggtggtgggcactcctgattcccccgtcctattctctcgccttctagaacccctaccctgagaccagcgctggctttctctcccgcctgtttttctggtggttcacaaagtgagttggctcttccaccagccaggccagagggaggggagggatggaaggtgagatggagaaaggggagcagggcagcagtttagggaccgggctggccacctatcccaccccccaccgcagtgggcacagggcagatgagggtagggaagtggtctgggagggggaccaaatgcagaggcctggcctggcccagtgccgcccccaggctacaggccagccctgcatctggcaggctgtggggacaggcccaggaggctggaagaagactgtcattagttctgagctcctctgtttgtgataaacttgcagcctgtcatctccttggctgcgcctcagagcggcttgagcaggataactgtgtctgtgacctgggtgacagctcattaaccccacagcactgaggaagcacccgaggctggggccaaattgcccaggcctcgtcctcacccagggccccaggcagcgtggattccatcaccagggcctggggtggggaggagatgggacacctggggaggaggaggagaagggggtagtggtaggaacttcggagggagagccagtgacctcaagcctattcactgaggaaatgaaggagacacctttcatggtcacagtgcccgagggagaccctcctttctggagaccctggggccctggagacactgacccttggctccaggctgctaaaccctgaccctctgcggggctgcctgccgggcttcacctccccccaggatggccatctatggctaccggcatcccctggaggagaaggacctctggtccctaaaggaagaggacagatcccagatggtggtgcagcagctgctggaggcatggaggaagcaggaaaagcagacggcacggtgaggccctccccttgccccaacacccagccccttcgcttaccccagatctcctgcagaggacgctggtagaccttggagggcggcattgctggggtggcaagcagagcaggaccaggtgatttcttggcagcctcgggaccattctatgggaagcttaggcctggatggcgctagttctcccagctctggtgggggcaggagaatggctggcactttggagcaactactccatcccaggtcccatcctaaggatataaataaactcacttaatttttcaacagccctaaagggtaggttcaagtgtccctgtgttacagatggggacactggggccgggtgtggtggctcacagctgtaatcctaacactttgagatgccaaggcaggaggattgcttgagtccaagagttcaagaccagcctgggcaatatagtgagaccttgtctctacaaaaaataaacaagatgagccgggcatggtggtgtgcacctgtagtcccagctacttgagaggctgaggtgggaggatcatttgagcccaagaggtcaaggctatagtgagctgagattgtgccactgtactccagtctgggcaatagagtgagaccttttctcaacaacaacaaaaacagatggagacaccgaagcacagaaatttaacagagggcctcccagggtccccaagttggtggtggcagagctggaatccacatggagccggctggccccagaggttctcctcatatcactgcaccaccctgcctgactgagagggctgattccagggccaggagccagcacacccctgccaattctgcctcctcctgtctggaggcggcggctgaatgagatgatcttcccctgaggggtcttcccactgtcagcctcttatcaaggaccacaaacctgtctctggccaactgcctcaccaagagagctgacgctgagcatcatctttctccacccaattctgaccccaggattgaaccctccctcctcccatccacaatccaggcctaggagttcaatgtttgctcagcccggagcttccggttgtcaccagctgttggaggagcctggggctgggcatggttagcagtatcctggctttcatggcttggagcctccacgaagacctatgggcccccagtctgcctgctgcaccccctctcagtccctccatgccactccaccccctccctgttcagctgcccggtggctgtaccaacagccatccttgatcttatctaccttccctcttggcgtcctccctggagccagcactggggaggcggggagagggccagactggggggatagctgggttttagagtccttgtggtagcagtctggccaccccttcagatgccctctggcagctgaggacagagtcgcttgtgcaattcttatgctgtctgttcccctcccagctctgagagccaagaaaacagctccttcctcctcctcactcctagccagcccagcctagcccttggcttcctggagcccctgtccccattcctaacccactgctccttcctccctggaccagacacaaggcttcagcagcacctgggaaaaatgcctccggcgaggacgaggtgctgctgggtgcccggcccaggccccggaagccctccttcctgaaggccctgctggccaccttcggctccagcttcctcatcagtgcctgcttcaagcttatccaggacctgctctccttcatcaatccacagctgctcaggtctctccacactccggctcactatagccctgccctgggcagcagggctggctggctagcccagaggaaggaacaacgtacagtgaaaagaaccccagaccaggaaccagggaggctagctccactttctgtgtgacctttggcaagtggcattgcctgacttgtttcctcactcacattcaacttagaattgctgtgcatatactatgtgccgggcaccgtggtgtgtacgttaacaagcattgggtctttaaatcttcccaacaatcctatgcggaattgccccattcccatgtcacagatgagaaagcaggaactcagagaggtgaagtgacttggccaagggcacacagcaaagaaggaatcaggtctgagtccaggactctgagctccgactgaggtgctctgtccccaccatcaggctctaacatctgtctcaggaatggcttggactagaacgagctctcaaatgagagggtgggaaggagagctgcctagtagctaagtccccacctccttgcccctccgtgcatgcattaatttgttcagcaaacatttattgaacctccagggtaccagaatggtgctcgatactagggatacagagttcaataagacagggtcttgatgtcttatgggagaaaccagcgtgtaaatcaattagaattcagtgggggcagaagtgttctcgggtgtctggaaaaccccgggaggggcaaagaagccagcctgggatgcagcaggaagcacccactggcttgggaggtcaacgaatttggagagacaagtaggtgaagaaacaggggaaagttcagcctcagcttagtcacaaagccctgaaacagcatgactcaggtgtttctgagtggcagaggaaatggcaacgagagggaggggcaggaaaacagagagagggagagctaaggatatccttgaaagatctgagccagggaggggcatctggcttcaaggatctcctgccaggagtgtgggggatgtagggcagggtggctggatggaagtgggccaacccggtcagatggagtccaggccaggaatgagacaagtattcaggagcaatttgggagatgggcgtgtgcgccagagagacagaggagtgccaggcaacctgggtgctggcctgggtaactggaggacgatggatcttttgctgagctgatgggctcggtgggaggaggaggctgggtggggggcaaggtggtggatggagtctggtcatgtggggccagtggtgctggtgggtcctccaaggggagattcccagctagctggaagtcaaactctcgagcccaagagtttgagaccagcctgagcaacatagcaagaccctgtctctacaaaaaagttaagatattagccaggcctggtggcatacgcctagagtcctagctactcaagaggctgaggtgggaagactgcctgagcctgagaggttgaggctgccgtgagctgtgatggcaccaccgcactccagtctaggtgacagagagagaccctgtctcaaaaaaaaaaaaaaaaaaaaagagagagagagacaccagtcactgggctggggccactggggcccaccctactccaatatgacctcaccaaatgaggccacgttcacaggtaccaggtgttgggagctgaacatatctttctgggagacacaacttaagctatcacagaaggggaggcctggctatgattatggctggagggctccatgtagtcgagaggagagtgtcccaacaatgaagagactcggtcatgtcaataggtgaaggtgtagagcttccagcagaggtggccagggtgaagctcagcggcaaagggggcaacagcgcagcaagttcctgaggaggcagaggaaggccagggctcgggggcaggggcagcctccgacagcctgagcaccagaaaaaggaggacaagccactggagggcagtttgtgagtggcaaggagtttgtgggtggcagggagttctcaatgggtggctaagcaagaaggcaggtagctgctgagaggggtggggggctgggatgggcctgaagggaagagaagagaggtgaagaaggccccaagagcgggggcggattagggacctagagaaggttgctaggcagtgctgggggccactgagtttggaaaggtggatttgagcggcaagagtctttgtggtcatgtggcggaatctagagcccccagcagcctaggagaaggagcagggaagtccagtcaatggaaacgtggcatttcttcccgccatatgtcaggaggtaagaaggcaggcaggtgaggctggtggtgagagcgtcatcgatagggcgtgcagcagggtccatggtggatagagaacgaggtgaaggcagagtggagccaggaggtcgtggtcttgaggcagtactgggttgaccctccctggcccaagaggttggagggggtggaggtttcagaggccaggggtgcagtggagactgcgggtaaaagcaaagggcagcagaggagggagcagccatgggggcagcactgcccacctcactcctctctcctccccacagcatcctgatcaggtttatctccaaccccatggccccctcctggtggggcttcctggtggctgggctgatgttcctgtgctccatgatgcagtcgctgatcttacaacactattaccactacatctttgtgactggggtgaagtttcgtactgggatcatgggtgtcatctacaggaaggtcagctggagcagggcccaggggaaaggctggccctgggcagcttgcaagaggctcgcagccaagtccacccactactgtctacctgcaggctctggttatcaccaactcagtcaaacgtgcgtccactgtgggggaaattgtcaacctcatgtcagtggatgcccagcgcttcatggaccttgcccccttcctcaatctgctgtggtcagcacccctgcagatcatcctggcgatctacttcctctggcaggtgactctccaaccctgacctctgcctccttcctctgacatgctgcagaagtggcaagagaggattattctggaactgggagcatggcacatgcttgtagtcccagctgctcaggcggctgaggcaagaggatcacttgagcccaagagttctggctgcagtgcgccacgattgtgcctgcgaatagccaccacactccagcctgggcaacatagcaagaccttgtctctaaaaagaaacaaagaaaacagaaaaaaagaaggagggttattctgggttagcagaggggatatagaattgacacaagagctggctgggcacggtggctcacgcctgtaatcccagcattttgggagaccaaggcgggtggatcacgaggtcaggagttcgagaccagcccggccaggatggtgaaaccccatctctactaaaaatacaaaaattagccagacgtggtggcgggtgcctgtagtcacagctactcaggaggctgaggcaggagaatcgcttgaacccaggaggcagaggttgcagtgagccgagatcataccactgcactctagcctgggtgacagagcaagactctgtctcaaaaaaaaaaaaaaaaaaaaaaaaagaattgacacaagagcttccctaggcattggtggggatggagggataggacttcgaggatgctgatgtctgcaaaggaatcttcccaacatctgttgctatccttcctgcagaagccagggaggaaagaaagtcttggagggaggtgggtgtgactctggctgtcatcgtctatatttgccttcctgtgtgtctggacacccttctatatctgctgtctgtccctgtcgtcgttatctaatggctggctgcttctacaaatgttgtggtcattctgactttctatctgtttggccaaccaccatcttttgcttcctgcccatctacacatttcaagttaacaggcctctgtttgcctgttgggttctctctgtagactttggtaatctgtccctatgtgtcatctatccaccggtgcctcctcagaacctaggtccctctgtcctggctggagtcgctttcatggtcttgctgattccactcaacggagctgtggccgtgaagatgcgcgccttccaggtaggtgctgtcagaggtgcatcctcctgcctgcagcacccggccggctgcctgggggaaggtgtccactaaccttggggcctcccaactaccttgcttcctgagtatggatggctactagccatttgcagaaaccatagctcactcttccctcacagctctcagagggttttactgacattctcattttgtagcagaagaccaacgcttagagaaataatggcagtccagaatcaggcagggctgggactcaaacctgactatcctggtctaacaaggagttttcccgctgcactgtgctaagcatgaatagccagtcactcagtctactatttgcaaacatttcttgaagtgttttttttctttttttttttttttgagacagggtctcgttctgtcacccatgctggaatgcagtggcatgatctcggctcactgcaacctctgcctcccgggttcaagcgatcttcctgcctcagcctccctagtagctgggactacaggcacatgccaccacacccggcttatttttgtatttttttttttagtagagatggggtttcaccatgttggccaggctggtctcaaactcctgacctcaggtgatccgttcatcttagcctcccaaagtgctgggattacaggtgtgagccatcacacctggcctattgaagtctactagcttcccactgcccataggaaaaatgacaaaccccctaagaagactcagcaggcttctgcttaccttgcaagtcctcaccccctgcggactggccaagtttcagccagtctggtcttctttcttttctccacagcaccaagctcagggtacctctaggggccaccacatatactattccctctgcctggaatgcttgtcatccccctcttgcctgcctaactcctttccttcccttacctctcggcattgaagtcacttcctcggctgggcacggtggctcatgcctgtaatcccagagctttgggaggccgaggcaggtggatcacctgaggttgggagatcgagaccagccagaccaacatggagaaaccccgtctctactaaaaatacaaaattagccgggcatggtggcacatgcctgtaatcccagctactctggagtctgaggcaggagaatcccttgaatccaggaggcagaggttgcggtgagccaagatcgcgccattgcactcccacctgggcaacaagagcgaaactccgtctcaaaaaaaaaagtcacttcctccagaagtccaccctgactgcccagtctcagtctaagttagtttccctgccatcacctcattactttcttacaggatcctgtgatttcccatcagaacacacataatgattaataattaagcatttattcagatcattgtttgcttattgtatgcctcccccatcagatcgtcagctgtatcatggcaggggccttgtctgaattcatcgtgacaaattctacacgtagcccatggcctggcacatagtaggcactccataaataggggttgaatgaatacattaatctggtgtgccacaccttgggctaaggtcttggagaacaaagagaaataaatagtccatcccctcaggaagctcacagtctgattagagaaacatatatgtaaaggaatggttatggaacaaaaggaaagtgcaatgtgctttagaaacccagggaaggggaccaggtgtggtggctcacacctgtaatcccagcacttggggaggccaaggtgggaggatcacatgaggccaggagtttgaaatcagcctgggcaacagagtgagacctcgtccctacaaaaaaatttaaaaattagctgggcatggttgttcatgcctgtagttccagctagtcaggaggctgagacaggaggatcaaaggagcccaggagtttgaggctgcagtgagctatgattgtaccactgcagtccagcctgggcaacacagtgaggcaccatctctaaaataaataatactagcaataataataagaagaagaaaaagaagtagtaggagaagaaacccagggcaggggacagaggatgctgcctggggaggccggtgcagtggcactgagggtggagatggatcttgtcaggcagaggacacagggaggcaggggctgtgcattccaggccaaggcacagcacaggcccagcaaggagttgtgagaaggaatggtgggcagcgtggaatggctgcaatggatgagaatggatggaaggtaggaccctgtgagcaggaggtcaggggagggagcaggtgtgccactgacactctttctgcctgcacaggtaaagcaaatgaaattgaaggactcgcgcatcaagctgatgagtgagatcctgaacggcatcaaggtgctgaagctgtacgcctgggagcccagcttcctgaagcaggtggagggcatcaggcagggtgagctccagctgctgcgcacggcggcctacctccacaccacaaccaccttcacctggatgtgcagccccttcctggtgaggcttggcacagggctgggtccctgcctccagggctctgggtgcccaggcatggccagggctcattggactctaccctgacaccacctccacgctgctcaggtgaccctgatcaccctctgggtgtacgtgtacgtggacccaaacaatgtgctggacgccgagaaggcctttgtgtctgtgtccttgtttaatatcttaagacttcccctcaacatgctgccccagttaatcagcaacctgactcaggtaaccctgggtagggctgggggctctactggagttggaacaggttgttggggtcagggaagggtcacttagggcaagggataatcagggggagttattggattcagggaaggttgctagcattatgaagagctattcaaggttgaatgaggtcattaaggtcaggggtcatttggagtcacaggtggtcaggtcgggtgtctggaaacctgagttctgtagatagcctcctcttaccaacctggactttctctttgggcagtgggagccatggaagactcagtcgtgggagggaccccagtgctagtgtctgggccctcagggggtcctgcctagcccaggatgctggggatggggcgagggtaggggttgggggttgggaaagtacagtctctagggctgactcacatcctcccgtaggccagtgtgtctctgaaacggatccagcaattcctgagccaagaggaacttgacccccagagtgtggaaagaaagaccatctccccaggtctagagagcccctacctgggctgcctgccccagtccttgctccagaaaaacctctgtttcaagcttttcctttgttctctcctgaccccttttcttcttcctctgttcacatctgcttcgactctgacctcctccctcttccgggttctctgctctcctccgccctcctccacagggctccccacatccctttcttcctcccttttcccaaggatcccctccccatggcccaggctcctcccctgtcctcctttcccctgccccccagcctccctgcaggctaccccatcccttgagctccctccctgaccctgcccaccttggtcctctcaggctatgccatcaccatacacagtggcaccttcacctgggcccaggacctgccccccactctgcacaggtaccagcttctcccactcccttcccagctgcccacggtgggctggaagttcagatcaatagcagcaccctgcaaagcctttgaccaagaatgcaggaagagcttcagcctgccaggggggtgtctggaagggcggagggcttggttctgcaggtggagggttggagaccaaaaccctgatccctgcctctaactggactcctggggtccttgcccccagcctagacatccaggtcccgaaaggggcactggtggccgtggtggggcctgtgggctgtgggaagtcctccctggtgtctgccctgctgggagagatggagaagctagaaggcaaagtgcacatgaaggtgagagaggcaggggctcctgggcagggtgtggggctcagccaggccttgggcaagccccgaggtaaatttctcctgtggccagggctccgtggcctatgtgccccagcaggcatggatccagaactgcactcttcaggaaaacgtgcttttcggcaaagccctgaaccccaagcgctaccagcagactctggaggcctgtgccttgctagctgacctggagatgctgcctggtggggatcagacagagattggagagaaggtacagagtcctcttccatccctaagaggctagggcatagagctgcccacctcaacccagcccaggtccatatattcatcccttcattcacacattggtgtaacgttatgcccaactctgtgccaggcactggggaaacagatctattagcagatctgtttagtgaacaagtaggaactattgaatattctaggagccaggctgaaggcctgtgcagggtacagggagggcacagcagggagcctacataaggaagagcatcactttttttttttctttctttctgagataaggcctcactctgttgcccaggatggagtgccatggtgacatcatgggacgctgcagcttggaactcctgggctcaagtgatcctctcgcctcagcctcctgagtatctgggaccacaggcacatgccaccatacccagctaaatttttaattttttttagagacagcgtcttgccatgtcgcccaggctggctcaggagatcctcccaccctggcctcccagagtactgggattacaggcatgagctgctgcacctggctgagcatcactttttttttttagacagagccttgctctgtcacccaggctggagtgcagtggcgcagatcatggctcactgcaacctccacctcccgggttcaagcaattctcgtgtctcagccacccgagtagctgggattacgggtgcgcaccaccacacttggctaatttttgtgtttttagtacagacggggttttgccatgttggcccatctggtcttgaactcctggcttcaagtgatccccccgcctcagcctctcaaagtgctgggattacaggcatgagcaccgtgcctagccttaagcatcacttttgacctcagttttaacaactgaggaggaggagctcatcatgtatctgttcattcatttaccatatatttattaagcacccactctattctgggaaatagtatacagtagtgaatactaaaatgccgggctaatatctctaccttcatatagctcacattctagtggcaggaagagataataagtaagataaataagtacaatatataatatgttagataaatgctcagtggaaaaaataaagcggggaaggaatacaggaatgcctgcagagttgaatggttaaggtagcttgggaaatcctcactgagaatcagagaactcaacaaagagaccgagtgagccttgtctggagccagaaagctctgtctggggccatggaaccctgtatggggtcttggagttctctggcatgactaggagttgggaaatggagggaaaagatagagagaggcagaaccctgattaccttggttaagattttggcctttactctaaaaaacatggaacactggggaaaatttggggctttgctttttaacaatttttaactgtggtaaaaaccacacataacataaaatatatcatcttgcccggcatggtggctcccagcactctgggaggctgaggcaggtgtatcatttgaggtaaggagttcaaggccagccttgctaacatgataaaaccccatctctactagaaatacaaacaaattagccgagtgtgatggcgtgtgcctgtagtcccagctactcaggaggctgaggcaggagcattgcgtaagcccaggaggcggaggttgcaatgaactgagattgattgtatcactgcattccagcctgggcgacagagcaagactctgtcttaaaaaaaaaaaaaagaaaaaaaaacttaatcatttcttagtgtacagttcagcaatgttaagtacatttacattgctgtgcaaccgatctccagaaccttttcatcttgcaaaactaaaattgtgcctattaagcaactcctcattccccactgcccctaggccccagtaaccaccattctattttctgttcctaggaatttgactacttagtatcttagtccattttctattgcttataagagaatgcctgaaactaggtaatttataaagaaaagaaatgtattttgtacagttacggaggctgaagagtccacggtccaggggctgcatctggagagggcctccttgttggcggggagtctgcagagtcccaaggccatacagggcatcccatggcaaggggaccgagcatgctagctcaggtctctcttccttccttccttttttttttttttttttttttttttttttgagacaaggcttcactctgttgcccagactgtagattggagtacagcggcgtgatcttggctcactgcaacctccgcctcccaggttcaaacgattctccttcctcagcctcccgaatagctgggattacaggcgcacgcaactacagcccgactaatttttgtatttttagtagagatgggtttcaccatattggccatgctggtcttgaactcctgacttcaaatgatccacccacctcgacctcccaaattgctgggattacaggcatgagccaccacgcgcgacctcaggtttctctttctttcttataaagccaccggtcccactcccccagtaacccattcacgcatcaacctattaatccataaatggatcaaccattcatgagggctctgttttcatgacctaatcacctggtaaatgccacccctcaatcctgccacactggggggtaagtttcaacatgcactttggaaggaacaaatatttcaaccatatcacctaggtacctcacgtaagtggaatcatccagcatttgtcttttcgtgacgggcttatttcacttagcataatgtcctcaaggcatatccatgttgtagcatgtgtcagaatttccctccttgtaaggctgaatgatatttcattataggtatatacacatttgtgtgcccatttatccgtagatgggttgggcaggacaccaagctgggcagggtggtgaccaatggagcagaatggcctcacctgccccaggaggacttaccctttacctctgtccctcacagcattgcagggacagactaggccccatgtgaaatatagattcagaagactgctgttctggtcaggcacagtggctcacacctgtaatcccagcactttactttgggaggctgacgtgggccaattgcttgagctcaggagttggagaccaggctgggcaacatatggagattctgtctctataaaaaataaaacattttagtcagtagccaggcatggtggtcctgcaatcaatcctagctactcgggaggctgaggcatgagaattgctcaaacgcgagaggcagaggttgcagtgagccaagatcgcaccactgcactccagcctgggtgagtgagaccccatctcaggaaaaaaaaaaaaaaatctgccatcccaaataacagtggacaggccgttgtctccctgtgcctgtctgaccccatttttcccaccccccgcctccctccagggcattaacctgtctgggggccagcggcagcgggtcagtctggctcgagctgtttacagtgatgccgatattttcttgctggatgacccactgtccgcggtggactctcatgtggccaagcacatctttgaccacgtcatcgggccagaaggcgtgctggcaggcaaggtgaggcctgccagaggctaagggggctaaggtgagatctgaggcccgaagagagagctggtgagaggctgaggggtttggatgagacttggaggtgtggggggcgcaagaagtgggcatgtgggttgggcatcaggagaaacctgtggggacaactcccccacctgcgaggttctgagcaggctgtggcgagcacagggtgagtcacccatgtgcctgtccaagctccctggcacatgggcacacttcacactcactctgtggctccgtgcctgtgccaggggtgtgctggagggtggtaggggtgagagcctgctgccttctccccagacgcgagtgctggtgacgcacggcattagcttcctgccccagacagacttcatcattgtgctagctgatggacaggtgtctgagatgggcccgtacccagccctgctgcagcgcaacggctcctttgccaactttctctgcaactatgcccccgatgaggaccaagggcacctggaggacagctggaccggtatctgccatcctgggccctctgattcccatgccttcccagcattccccctgtctggggtctctgagtgtgtctagactggcctagtgttgtgccaggcaggttctgggaaacttgggccatctgtgtgacagtcaccagaggtaaagtaaactggacatagtcgggtcccactgcctcctccatcctactctaccctaactgtgggaactcagatcctccgccccggtctcagagcctgttttctttctttctttctttctttctttctttctttctttctttctttctttctttctttctttctttctttctttctttctctctctctctctctctctctctctctctctctctctctctctctctctctctctctttctttctttctttctttctttctttctttctttcttttttttcttttgaggcagagtctggctctgtcgccgggctggagtgcagtggtacaatctcagctcactgcaacctctgcctcccaggttcaagtgattctcctgcctcaggctcccgagtagctgggactacaggcatgcgccaccacgcctggctaatttttgtatttttagtacagacatggtttcaccatgttggccaggatggtctcgatctcttgacctcgtgatctgcctgcctcggcctcccaaagtgctgggattacaggtgtgagccaccttgcccgatctcagagcctgttttccatctgttgaaagcataggagggcccaggcccagcttgtgtggcaaggctgcttcatggataaatagtttggcaagtatgcaagtgcttagcaaagccgcttatttatcaaccaaaatttattggacaatcactatatacaggcactgttccagacactaagctatagcagtgagcaaacaaaaaaattatagtcctcatggagcttgttgacgtctctgggctcacaacatgcccctggctccttgttgcccagacccagctccccagcccccaattctggattggctcacagaccttttcctgggctttcttgcctatggctatacatacagccaacgtgccttgagcatttaccaagtgctgtgcccctcgctcacacactggacacattttcttttaagcctacagtcatgcagattttttttttttttttttggggacagtttctcactctgttgcccaggctggagtgcaacggtgcgatcttggctcactgcaacctttgcctcctgggttcaagcgattctcctgcctcagcctcccgagtagccaggattataggtgcccgccaccacgcccggctaatttttgtatttttagtagagacggggtttcaccatgttggccaggctggtctcgatctcctgacctcgtgagctgcctgcctcagcctcccaaagtgctgggattacaggcgtgagccaccatgcccgaccaaggacgtgagttttaagctcagccagtctaactccagagcccaagttcctaacccttgtatttgagtccgtttctccataatttgtgaagagagtttttcttgttgcttaacccaagtctttcttgttgccctttcaatccccctcattttattttcatgcttgtccattgaacccctttcattagagtggggaatgggagataccaggggcttgcagggagaactagctgaaccctatctccttcctcccaccctactgcagcgttggaaggtgcagaggataaggaggcactgctgattgaagacacactcagcaaccacacggatctgacagacaatgatccagtcacctatgtggtccagaagcagtttatgaggtgagttcctgagagctcccagccctcccggaggctgtatcaggcctccccaggccctgccagatggggtgcaggtttctccctgacactcccagcctctgtcctggggggtgcttgaggccccctccctgggcctgaccagctgcctccacagacagctgagtgccctgtcctcagatggggagggacagggtcggcctgtaccccggaggcacctgggtccatcagagaaggtgcaggtgacagaggcgaaggcagatggggcactgacccaggaggagaaagcagccattggcactgtgagtcggtggggcaagaggggctggaggggatggacaggcaggccccagcagccccagggtttatggagtcccctgtccctgactgccatggctgctccctacaggtggagctcagtgtgttctgggattatgccaaggccgtggggctctgtaccacgctggccatctgtctcctgtatgtgggtcaaagtgcggctgccattggagccaatgtgtggctcagtgcctggacaaatgatgccatggcagacagtagacagaacaacacttccctgaggctgggcgtctatgctgctttaggaattctgcaaggtgagcttgtgggggtgtccagaaggggctccaatatcccttcttctctgggctgccaggccccccaaaccgtgcccttgcatccaagcctccctaacccactctggtcaacccgtgtctctgattctgcccctttgtgcccgctcactagtccaggtgagccagcgccctctgccttctccaacagggttcttggtgatgctggcagccatggccatggcagcgggtggcatccaggctgcccgtgtgttgcaccaggcactgctgcacaacaagatacgctcgccacagtccttctttgacaccacaccatcaggccgcatcctgaactgcttctccaaggacatctatgtcgttgatgaggttctggcccctgtcatcctcatgctgctcaattccttcttcaacgccatctccactcttgtggtcatcatggccagcacgccgctcttcactgtggtcatcctgcccctggctgtgctctacaccttagtgcaggtgtggggtgggcgtgattccagtgtgggcgtggtgttattggggcggggcaacacatgggcgggggcagcaggggtgggacacttcaggccaccaacattacagagttttgttaggggcagtcgttgcttaacatttatgttaggggagccattacttaacctctttgaaactcatttgcctcacctgtaaaatagaatgactcatagaccttcctcatggagttggtgagagaataaaatgaaatagttatacattgtagctggcactgggactttcctgttggctttttttttttggggggggggggacggaatctcgagtctcgctctgtcgctcaggctggagtgcagctgcacgatctcagctcactgtaacctccgcctcccaggttcaagcaattctgtttcagcctcccaggtagctgggattacaggcatgcgccaccacgcccagctaatttttgtagttttagtagagatggggtttcactatgttggccaggctgctcttgaactcctgacctcaagtgatccgcccacctcggcctcccaaagtgctgggattacaggtgggaaccaccatacccggccttcctgttggctgttttttgataaaacattgtcaacagtttgggacacattatcctttccttccttttatacatatctaaacatacgtgtatgcatgcgtttaacatagatgagttgataaccttcagatacagctaactgtaaaaggcctttgcagacactgaactcctgttctgtaatgaattagtcagttcccggggatagatgctcaacacctgggtatagcgaccatgatctaggctgtgctctgtgctgggctaggggagaatcagatagacatcctgtatagcctggatatctgaggccacagaggagaggatggaaactggaggcagagccgtgttgttgtggggttgaagcagagatgatcagagggagggagtgaatgacacatcaaggccccaagtcttgggtccttggaggtgggggaaggcagcgatgtctcgtggtgggagtgaggctggctgggaggactcatctgaaaatggatgagttcagagacaggcaggactgagttgggggttccatggccctgaccccaaactccttctccctccatcagcgcttctatgcagccacatcacggcaactgaagcggctggaatcagtcagccgctcacctatctactcccacttttcggagacagtgactggtgccagtgtcatccgggcctacaaccgcagccgggattttgagatcatcagtgatactaaggtggatgccaaccagagaagctgctacccctacatcatctccaaccggtcagaagccgcctccctcgctccctgctcctccaggaattcccagcaggctctctggtgttcagggtccttgtccctcctttcccctaagcagaaaactggccctgccctgcccctgccccatttcctcctcatctgatcccccataggtggctgagcatcggagtggagttcgtggggaactgcgtggtgctctttgctgcactatttgccgtcatcgggaggagcagcctgaacccggggctggtgggcctttctgtgtcctactccttgcaggtatgaagggcctggaccccagggcagggccaccactgggacagaaaccacacaggtgttccaggcatctcccgagtgcccctccctgctcagtatgggcaccagccacagggtctgttctcaaggactgtgagaaaaaaaaaaaaagaaaaaaatcattgagttgacaagtttataaccacacaccatggctggatgttcctactttccttccccaagaagcccatgttctcacattcagaaagaattctgttgaataatctctgtcctcaaaccccacatctctctcctgctcagccgtcgaccttgcctgacacctcacagttcaactggagagacccccatcagcaggagattgtgctgcaggctgagcaggtctttgtggctggagaaacaaaatgttttaaaagcccagaagagggactgggtgcagtggctcacacctaatcccagcactttgggaggcggaggtgggcggatcacctgaggccaggagctccagaacagcctggccaacatggtgaaaccctatctctacttaaatacaaaaattagccagccgtggtggcgggcatctgtaatcccagctactcaggaggctgaggcaggagaatagcttgaacctgggaggcagaggttgcagtgagccaagatcacgccactgcactccagcctgggtgacagagcgagactccatctcaagagagaaaaaaaaaaagtccagaggagttttcttgctttggggtgttgtagaaatgatcttggagcttagccccaaaggacaaacagaatttctcttgtctctgggcaagttgtaggctcatgtgacaggtcaggacagtgtagggctggcataccgctcgctcacgttcacatgcttgcagagaacgtacacagacgaggtgactgaagcctggtctgcaggtcaggcaggtcatcctgatgccagcttgtactgtcaaagagtcacctaactgcaaacggaatttttgtaaagcagatcacattgttaatacctcaggtggctcaaaccttgaacgcgttggcaaacaaaaaacaatccagaaaggtcaattttcacaaaggtcagtgtgcacatgaatctacttgttaaaatgtacattttgattcagtagacctaggatggggctcaggactctgcactttgatcaagactccttggtacgcaaagtgtggcccatgggccagttgcatcaccatcctctgggagcttgttagaaatgaagaatctcaggttccaagtcccacctcagactacagaatccggcgttgcattttaacaagattctctgggaagtcttatacatattaaagttggagaaacagaaaccaaggcgaggtggtccttggttaagtctgcactgtcactgcccaagggagtcattcgtgattacagccccagctggcatgcctgtgggcttgatccaggcccacctgggtcatccatgggctaggatcccatggatgggcacatgatccaggagtctgaactcctcccaaagccattacggtggggaggggagatcgccatacgtataacccagtccctttggccaggtgacatttgctctgaactggatgatacgaatgatgtcagatttggaatctaacatcgtggctgtggagagggtcaaggagtactccaagacagagacagaggtgggtactggcatgagcccgggacagggggaatctgaagtagctggggaagaaagcttggtggctctctctccctcaacatcagggcctgccacgtatggggctcttcattcatttacccattcactccttactgagcatcaaccaatgctctatgctaggaggtgtagagagatcagagttgagcaagacggtgtttgcccttaggtgattctgatttggtgggaggggtaagacctattgcagggctttgcagtggatgaccagatctctggcgtggtgcacctggagagggcagatgagggagatccttcagctggggtgaccaggggagacgagcttagatgagaaggatggacaggctttgatagactaagtaagatggtggggtgggcagtgggaaggtgagcattccagccaaagagaccagcctgggcaaaggagtggaggtggggcagcatgccctttgttggggaaaaggagttgttccctactgggggttccagacttttctccaccgccccctctcatggtcacaccttagccctcttcatgcccagaagctgcagcatcagtgtcaagcatcccatctttggcccacgctcctatcctgctcgctctcatgctccaagtcccccactgtcacagcagtctgccttcactgggactcccaatcccatgacccccctttgtgtctctgtccatcagcttctctgccttcacctccctccccggccagcctagagtctatgctccaccaacacaaacgctctcacctgccttgcccttctctttcttctctctcagttgtactcacctccaaaacccaccccagctgagcccaccaatctgccttcttcatgcctgcactgagcacttaaaaccttgcaggaggcggggcacagtgactcatgcctgtaatcccagcactttgggaggccaaggtgggtggatctcttgaggtcgggagttcaaaaccagcctggccaacatggtgaaaccccatctctactaaaaatacaaaaaaatagctgggcgtggtggtgcacacctgtattcccagctacttgggagtccaaggcaggagaatcgcttgaacccaggcggtggaggttgcagtgagccgagattgcgccactgcaccccagcctggataacagagtgagactctgtctaaaaaaaaaaaaagcttgcaggagaaaaatcactgagttgacaagtttataaccacacaccacggctgcatgttcctgctttgcttccccaagaagcccatgttctcacgttcagaaagaattctgttgaataatctctgtcctcaaaccccacatctccctcctgctcagccatcgaccttgcctgacacctccataaaaagtaggttctaagacgtgaactccctcaaccttcctgcctctcagtctttaaacccgcctgtgtctccttcaccgttgtctccttttcacttttagcaggaatcatccctttctgtttcaaagcccagcccctccatttcttctcatggccgcttgaggacctggcttcctcagtcccgccctccatctcctgtcattcttgctccctctgttggacgcttcccatccacatgcaaaaatattccatcacatcttccattccagacacacacgcaaaccctcccccctgcactccactgccccatttctctgctctcctctgtcatgaagcatggtttaaagtatggtctctacaagctgcatccgcttcctcatcagccttgatgtcatctgcctcctgcagtcctctttctggccctcgctccacggagacagctcaccagtgaccttcctggttccaaatccaggggacgcttttctgttctcgtctaattcaacctcttagcaacgtcccaataaaatgacctctcccttcttcttggagtcctcgtggattccgtggcctgcattgcacccgccagtccacctgcctgaccccagcctggcttccccaggcatcaccctctggcccctcacccctcactgtctgggagcttccagttcccctgcttcatgtctagcagcccagttcctgcatggatacccatgctcctgtctctgtatcctataaatgtctgccctcaaccccacggcccgttctctgacgcctccttgagagaccaatctgtgcctgctgctctgctttttcacctctggccgcgtggtttctcctgcctcgaagcagggctggctccacaggaatagtcacagcgtccccactcccggaagaactgcgcgtttagagtaatgctctgccgtcagtgccttgacattctccatcattcttcaacaagaagcctcaggttttcattttgcactgggcctcccaaattatgtagccaatcctatctcaaagccaccatcatcttatgccctgccagtctattctgcttgtagctgccaagagatttaaaaaaaaaaaaaaaaaaaatcaaatcacgtcattcctctgtgtacagccctctaatggctttgcatcttaatcagagttaaaaaaaaaaaaagtccttaaaatggcctgcaaggccctacatgatggagccaccattacctcagcctcttacctcttgcctttgccagtgtgctccagaacacacctagagccatttatgcctgctgttccctctgcctggcatgccctccctccagatatccacttggcttgttccctcacctccttcgggtctttactaaagtctgcctcctccaggaagccttccctgaccaccctgtataaagcagcaacactaagcacttcttggccccagcactcatcacttcttgcgttgtatagatttgcttatctgttgattatatgcctccctctactagaacataaatctcacgagggtgaggactgtttcaatggggtaccattgtgtccccactgcctggcactgggctgccacccagtaacaatgaatgggtaaaggtaatgagagggggagttagggcaggcagggagggcacttcaaggaatataaggtgtggcacagtggctcacacctgtattcccaggactttgggaatcctcctaggcaggaggatccctggaggctaggagttcgagaccagcctggtcaacacagcgagacacagtctcttcagagtttttctttaaaaaattagccaggtgtggtgacacaggcctgtagtcctagctaatcaggaggctgaggcaggaggatggcttgagcccaggaattcaaggttgcattgagctatgattgcaccactgcactccagcctgagtgacagaacaagaacttgtcacagaacaaaacaagttagccaggcatggtggcatgtgcctgttgtagtcctagctactagggaggctgagggaggagaatcgctggaacccaggagttcaaggctgcaatgagccatgattgagaccctgtctctcaaaaattaaaaaaaaaaaaaaaaaggaacatgggcaagcagggagactgggaggggaaggacaggggagtgttggagtaggtctgtggggaataaagtcagagggataaaggagtcattgaacacaaggctgagccacaggggtgccaaggaccctcccagggaccatagttggggaggattgaggggccttgggggagagagaccgaaaggtgaaagagggcttcactgggcagctgatgtgaccccatctgcccctcctgccaggcgccctgggtggtggaaggcagccgccctcccgaaggttggcccccacgtggggaggtggagttccggaattattctgtgcgctaccggccgggcctagacctggtgctgagagacctgagtctgcatgtgcacggtggcgagaaggtacgcgtggggtaggcgggcctgcgtgtgtgttcatgcctgcagacatggccacagcccttgtggggagcttgggtcttttgagagcacaagtgctccagccacatgtttgttcggcctccaggagagtcctggagatgcgcctttgacctctcagcttccccctcagagccccttcccttctccgcccaggtggggatcgtgggccgcactggggctggcaagtcttccatgaccctttgcctgttccgcatcctggaggcggcaaagggtgaaatccgcattgatggcctcaatgtggcagacatcggcctccatgacctgcgctctcagctgaccatcatcccgcaggtaggagcctggcatgggctggccacactcaccaacggccctggaggcaggccccaccttgttctgtagctttaggatggagactgggaccccagtctcagaggcttgggcaggtggggagggacagacagcaggaagcagagccatcagtgagccacccgtcatggatctggaaagctcagacttaccctgcccagtcaggccctgtcctttgacctcctgggccagcacatggggaaggacccctccaagaaccccttcccccgagacattctgccctggtctttttgcgcagctctaattacatttcactttttctgtctcctccggggtattttttgtttctgccgagtggacactttggagtcagattagtggctctggttcctgcttcaacagaggtcttcgtgattggcaaagctgaggtttatcactcccctacaggcaattttctatctctttggccattgtgtcctctggggagctggaaacagagtgggaatgctgccaccttaatccctctcttcttccctggacctggggcctatggctcctcatagggcctaagctgcctccctctgaggccacgttgtatccccaggaccccatcctgttctcggggaccctgcgcatgaacctggaccccttcggcagctactcagaggaggacatttggtgggctttggagctgtcccacctgcacacgtttgtgagctcccagccggcaggcctggacttccagtgctcagagggcggggagaatctcaggtaaacactgggagtgcagaggtcaggaactgcaaccctccctgggaaaccctggcgggtgctgggaaacctgacaccaatgacacagagatgaggccagcccggatgtgcacagggctgtcctttcgtattgagcatattccgtgtgccaggcatggtgtactgccccgccgactcctcacacaagccccagcggtggtccatgatcccacttcaccggtcagggaactgaggctcagagatggtaaagggcttgacctaagttgcacagctgggagaaggcaggtctgggatttgaaccagctctgggagattccaaaaccctttgaggaagccctctcccctccagagctttcttacagccccagattttatgtcctcagccactgggctatgcactggaggggccagtagtcacctcttactgagtctaaaggttggagatacctatacctgtgctagctgtgtgatttggggctagttgcttaacctctctgtgcctacttttctttcactctaaaaggcagataataacagtccaaacctctttgcattatgctgcccaataaaaaacaaagcaagtcatgcatatgaagctaatgtttttttcttatagccacactttttaaaaaggaaaaacaagcaaaataaactgtaatactataacttatttagcccaatatatctaaaatattatttcaacacatcattgatataagtattagaaatattttgcgtttcttcctacaagtttgaaatccagtgtatatttcacatttacagaatgtctcaatttggactagtcacatttcaagtgctaatagccacatggggccagtggctaccacctggacagagcagtgttagggtcagtgtgatgacaggaaaagcgcttcgcttggatgctcctgtaaaatgtcagcttttcccctcctcccttccctccatcttctcctcctcctcctcctcttccctattttcatttttatattcagtccatactcatgcaccctccccagacctcaaaaactaaaacaaggccaggcacagtggctcacgcctgtaatcccagcactttaggaggccaaggcaggtggatcacttgagggcaggagttcaagaccagcctggccaacatggtgaaaccctgtctctgctaaacacaaaaattagctaggcgtgatggcgggcgcctgtaatcccagctattcgagaagccaaggcaggagaatcgcttgaaccctggaggcggaggttgcagtgagccaagatctcaccactgcactctagcctgggtgaccgagcgagacttcgtctcaagaaaaaaaactttacatttgcccagcacttaacaatattcaaagcactctggcctccactttctcctttaatctttaccatggtcctgtgggccagaaacgagcctccacggtttgaaatgatttcctcgcagcagttcagctggtaaggggcagagcggggactctggctctgtcccaaacctttccttgctgtatcacagccacctccctcacctggacaacattccccaaggcccctcattatcccaagggtgggactcccttgccacccacgcagcccttaagactaaatatgcatcttaagtggctctcacttacataaccacgtgggggtggctggcggacaaacatggtctctccagaccctgtgccccatgactgtctcttgcttgatccattcttctcacctgcttgctctcaacacttcccccagagcatgccccaccccgacacatgccgtgatcagagacagaaatcagctcccctcctccctcactgagcttgtagccactttaagtataacctgtgtcctgtgccagttccaccataaatcagccctgagttctatccggcggcttattctgctgccaaaaccttcattagttgcgggaatgggccagggagagagcccggactttactccggctgtggtgactcacgcctttgggaagggctgaggtatttgtccttggatgtggggatgctgtggcctctggttgggaacacagcctcgttttgtctgctggctctggcttccagagcaggaggctgaaggcgtgtgtcctgctcctcctttacctcctcagtgaccagacacaaagagtccccgggtgttcctctgccctgccattttcttgtcccagaagcagagccctggcctgtattccctatggggtgggaggtgactgcctgaattgtgtgatattaggctcagcaagatggcatcgtgtggcctatttgcaaatatccaagaagagccatgcaagtatgttcttactaaggtgtaaatggctgatagagtgaagcagagaaacatcacggcactagctgaaaagcaaggatggggaagaaagcaccgagagaggaggccaagggtgccaagagcagaccagggatttcacaatgccttttagcactggctcattccccaaggcccctcattatcccaatggtgtccagacctctgctccgttctggagggctgggctgtggcagaaatgggagaagtcagacagaaaaccagtcctgggccactgaggagtgaaacaggtctgggaatgaggcccagaggcaggtgggaggcccccagctggaaatgcctgccttctccactcccagcgtgggccagaggcagctcgtgtgcctggcccgagccctgctccgcaagagccgcatcctggttttagacgaggccacagctgccatcgacctggagactgacaacctcatccaggctaccatccgcacccagtttgatacctgcactgtcctgaccatcgcacaccggcttaacactatcatggactacaccaggtgggacacggaaacctgagcaatggggaacctggtggggccacctggggcatcaggaatgggcagggcagattagggttatctgaacaaggcaatgttcctgggattgctagggcatggcaggcagagcagagtttcccaagatctggataaggggcagaccagagtggggtggcctgggctcaggggtggggtatacaatgacattttcatttttcttcttcttcttcttttttttttttgagacagagttttgctctgttgcctaggctggagtgcagtggctcactgcagcctcagcctctcgaagtactgggattacaggcgtgcaccaccacatccggctaatttttgtatttttagtagagacggtttcaccatgttggccaggctggtctcgaactcctgacctcaagtgatccacctgtctcggcctcccaaagtgctgggattacaggcgtgagccactgcgcccagcttcaacaatgacattttctaacacatggggaagggcacactgggctccacaggcactgtctttgtgcacaggccacttgcatcctgcctcctccatgaggcaatgtaaggggaactggaggcttcatgctgagtcccatcacttcctaagaaacctgctggcagagtgcctgcatgtccctcaccttattggtgtctcacagccactctggtcacagatgaagaagcaactcaagtggcagctggaccgtgacagcaccatgaggagctgagccttgtggggagagcactgtgtctggagtcccaggctgctgtgtgaccctgggcaatttgcaaaacctttctgagcctgtttcaaatgaaaatgatgcttcgtgggattgtcgtagtcaatgagggctgggcacagtggctcacacctgtaatctcagcactttgggaggccaaggagggcggatgacttgaggtgaggagttcaagaccagcctggccaacatggagaaaccctgtctctactaaaaacaaaacaaaacaaaacaaaaacaaaaatttgccggatgtggtggtgcatgcctgtaatctcagctactcgggaggctgacagagaattgcttgaactcaggaagcaaagattgcagtgagccaagattacgccaggacactccagtctgagtgacagagtgagacgttgtctcaaaaaaaaaaaaaaatggtggccaacgcggtggctcacacctgtaatcccaggactttgggaggccgaggcaggcagatcatttgaggtcagaagttagagaccagcctggccaacatggtgaaaccctgtctctactaaaaatacaaaaattagcctctcatgtggcaggcacctgtagtcccagctgctcaggaggctgaggcaggagaatcacttgaacccaggaggcagagtttgcgccactgcactctagcctgggtgcagagcgagactctgcctcaaaaaaaagaaaaaagtcaatgaaagatatttaaactgcaggtgatcctgggaaatgacagtgtcctccccagccccttgctctaattcttgcgctaggccctccaaggatgaggggaggggccatgccctcagaagcttgtggcttccttggagaggcagaccactccctcattgtgccagatgtcaaagtgtggtgctggaggtcgaggagagagggctgggtgactcagaagcctcacgggagtgaactggccctggcctggcaggctgtgctccctagaaactagaggggaggaggaggcaggaggctcagacaagtcttctttgaaggagtatagtgggaataccccaacaggccttcactcactcaagaaacacttgcaggacgatggagtgggaagggtgccatggacagggcaatgggtcagaccttgctctcttggaagtgcccccatgcagccagcagtgtcttgggagccaagctgagaatgcctgatgctaccctctgtctgttccatccctctcctaccctcaccccccactcccatttaggaccccactgggagaagggagggtgggcaggaagtgctgagccctgggtttggaggagggacagggctgggctgagaggacctgttcccaggcctaaccaaaactgtttcattcaccagcagccctagggtgaggggcttggatggaccttggaggttgggagttcattcattctagtggaacaggcagaaattaatcaaataatcatgtgtaaatagggcccataggaaggacgcaaaggcctgtgtgtgcaggccagaaaaaggctatccacacagggtggccaggacactttctcctgtaaggaagggatgcaccagccaggcctgaaagaatgagtaagagttggaggatggaggtggggcaataaggtagggagcgagctgaaaattgcaggcaaaggatataacacatgccccaaggcaggagggtacaggaggctggagtgcgtgggagggaggcagtagaaccaagatgggggtggagaacaggccgcactctgctgcactttgaggaccatgggagagcattcagtccttacccaagagcaatcaaaagccgctgaagaccttgattttggagtcagggttgggatcggcgggaggggagggggggcggtggccaggcagtgatgtcacagacacagtccttcccaggacacatctgggagcccagtaggctgagaaccagaatgcagtcagccccctcccatggaggagcacttctccaggctggggagagccccttcccctcctgccgtaccctggtggagccagcccactggccttgtaccaggtgcactcggtgagtggttggtgggagattctaaccctgggctcaggcctagctgtttgtgtgtgagctggagacccaccgagcagcagcagcagcagcagcagccgcagcagccgccaccagatttgcagcccaagccccagattccagtgtcagcctcgctgcagctggtttcctgccgtgtgcttttgtgagccgacacaaagcagatggatgtgcacagagcccagcgcacaggcccatggctccctgcgcacagcctgctgaagtcctgtgaccccggcaaggggaagggctcattagggaaggttttcagagccctgactagcagagatgaataggaccttgtgtttgatcccagaaactgcttcacttgccagaactaacagaatggctaaaataaccagccttgcaagtgtgcacatgtggtgcggtggctgtgttgggtgggttggcatgtcactgtgggcctgagcaagtacccagaagagcaggattagacgatgtgaccaggtcagggctgatggaaacctgaccacttctctcttttttgactagggtcctggtcctggacaaaggagtagtagctgaatttgattctccagccaacctcattgcagctagaggcatcttctacgggatggccagagatgctggacttgcctaaaatatattcctgagatttcctcctggcctttcctggttttcatcaggaaggaaatgacaccaaatatgtccgcagaatggacttgatagcaaacactgggggcaccttaagattttgcacctgtaaagtgccttacagggtaactgtgctgaatgctttagatgaggaaatgatccccaagtggtgaatgacacgcctaaggtcacagctagtttgagccagttagactagtccccggtctcccgattcccaactgagtgttatttgcacactgcactgttttcaaataacgattttatgaaatgacctctgtcctccctctgatttttcatattttctaaagtttcgtttctgttttttaataaaaagctttttcctcctggaacagaagacagctgctgggtcaggccacccctaggaactcagtcctgtactctggggtgctgcctgaatccattaaaaatgggagtactgatgaaataaaactacatggtcaacagtatatacacagtagtctttttgcacttgttcacaaggtttggggattaggatctttggaggaggccaagaggaagactttctacacatgtacatggttgtagttacctgaacttcagacccaagagctcttggctgcaaatattgccttcacagccaaaattccctgggtaattgccagtagctcctgctctgctgtgcagatattgtaaaacggtgagaaaggccctgaaatctgacctggggcctcttgggaaagctgctgtgaacacctccacgttaatgtcatccctcagccctctatgcctgtttctctagggactgagaagtgcatgatgcttttacttccttgctcatttcgaagtctgttccagacagttcctataaccagtgaggcctccaagtcattcattttcctcagtctagccaaagctgaatgtgtgagcacaaagaagccgagaggccacctcctgcccagagagaagccacccacactcccaggttggcagacaagatgtgaggggtgaattaaatttgttttcttgagcaagcca

SEQ ID NO: 8 - protein, 1527 aa, Homo sapiens
MDALCGSGELGSKFWDSNLSVHTENPDLTPCFQNSLLAWVPCIYLWVALPCYLLYLRHHCRGYIILSHLSKLKMVLGVLLWCVSWADLFYSFHGLVHGRAPAPVFFVTPLVVGVTMLLATLLIQYERLQGVQSSGVLIIFWFLCVVCAIVPFRSKILLAKAEGEISDPFRFTTFYIHFALVLSALILACFREKPPFFSAKNVDPNPYPETSAGFLSRLFFWWFTKMAIYGYRHPLEEKDLWSLKEEDRSQMVVQQLLEAWRKQEKQTARHKASAAPGKNASGEDEVLLGARPRPRKPSFLKALLATFGSSFLISACFKLIQDLLSFINPQLLSILIRFISNPMAPSWWGFLVAGLMFLCSMMQSLILQHYYHYIFVTGVKFRTGIMGVIYRKALVITNSVKRASTVGEIVNLMSVDAQRFMDLAPFLNLLWSAPLQIILAIYFLWQNLGPSVLAGVAFMVLLIPLNGAVAVKMRAFQVKQMKLKDSRIKLMSEILNGIKVLKLYAWEPSFLKQVEGIRQGELQLLRTAAYLHTTTTFTWMCSPFLVTLITLWVYVYVDPNNVLDAEKAFVSVSLFNILRLPLNMLPQLISNLTQASVSLKRIQQFLSQEELDPQSVERKTISPGYAITIHSGTFTWAQDLPPTLHSLDIQVPKGALVAVVGPVGCGKSSLVSALLGEMEKLEGKVHMKGSVAYVPQQAWIQNCTLQENVLFGKALNPKRYQQTLEACALLADLEMLPGGDQTEIGEKGINLSGGQRQRVSLARAVYSDADIFLLDDPLSAVDSHVAKHIFDHVIGPEGVLAGKTRVLVTHGISFLPQTDFIIVLADGQVSEMGPYPALLQRNGSFANFLCNYAPDEDQGHLEDSWTALEGAEDKEALLIEDTLSNHTDLTDNDPVTYVVQKQFMRQLSALSSDGEGQGRPVPRRHLGPSEKVQVTEAKADGALTQEEKAAIGTVELSVFWDYAKAVGLCTTLAICLLYVGQSAAAIGANVWLSAWTNDAMADSRQNNTSLRLGVYAALGILQGFLVMLAAMAMAAGGIQAARVLHQALLHNKIRSPQSFFDTTPSGRILNCFSKDIYVVDEVLAPVILMLLNSFFNAISTLVVIMASTPLFTVVILPLAVLYTLVQRFYAATSRQLKRLESVSRSPIYSHFSETVTGASVIRAYNRSRDFEIISDTKVDANQRSCYPYIISNRWLSIGVEFVGNCVVLFAALFAVIGRSSLNPGLVGLSVSYSLQVTFALNWMIRMMSDLESNIVAVERVKEYSKTETEAPWVVEGSRPPEGWPPRGEVEFRNYSVRYRPGLDLVLRDLSLHVHGGEKVGIVGRTGAGKSSMTLCLFRILEAAKGEIRIDGLNVADIGLHDLRSQLTIIPQDPILFSGTLRMNLDPFGSYSEEDIWWALELSHLHTFVSSQPAGLDFQCSEGGENLSVGQRQLVCLARALLRKSRILVLDEATAAIDLETDNLIQATIRTQFDTCTVLTIAHRLNTIMDYTRVLVLDKGVVAEFDSPANLIAARGIFYGMARDAGLA

SEQ ID NO: 9 - DNA, 18293 bp, Homo sapiens
  5'UTR (238)..(392)
  exon (393)..(571)
  exon (9993)..(10107)
  exon (10263)..(10436)
  exon (11603)..(11709)
  exon (12352)..(12488)
  exon (15471)..(15524)
  3'UTR (15525)..(15560)
  3'UTR (17911)..(18251)
atccccatcacaaggaaggtaggcattagtttgcaagagttcaagcccttagatctgcttttgaaggagaagaggctatttgtaagaaagctggtaagtttctattccaaggttcatgatctaataggaagactgcaggtgtggccgtcaggcccaagtcctaggtgagaatgcaggtctgcgagcccctaggaccggaccataacgaccttaacagccataacggccgtaactgccataacggccggctgcgcgaggcccttccagcatttccactttcgtcaggtactggagagggctgccggccggatgccagggcagaggggcagggcggacggctaggagttcaagaaacatcctggtctgagggaaaggctgcagcctgcaccgccatgaataagcttttcagcttctggaagaggaagaatgagacccgcagccagggctacaaccttcgagaaaaggatttaaagaaacttcacagagctgcttcagtcggggatttgaagaagctgaaggaataccttcagatcaagaaatatgatgtaaatatgcaggacaaaaaatacaggtgaccagactgaagagccagcgcgggaggacgggttggggcctgggtcgttcaaccagaaataagacaagtgggggctgtttgacactgattgtcactccgggtttcccaaagaagagagattgtctggtaaccattggcagagggtcccactccaactttcggctttttatttaatttaaaaaaaaaatgctgggccgggcgtggttgctcacgtctgtaatcctagcactctgggaggccgaggcgggtgggtctcctgaggtcaggagtttgagaccagcctggccaacatggcgaaaccccgtctctaaccaaaaatgcaaaaattagtggggcgtggtggcggacgcctgtaatcccagctactcaggaggctgaggtaggagaatcacttgaacccggaaggcggaggttgcagtgagccgagatcgggccactgcattccagcctgagtaacagagcaagactcatctcaaaaaaaaaaaaaaaaattgcttgcttgaatattttctacccttcctgaatccatcctctcctctgactggcttagtctccactggcagtccatcttttccccaccttactgttttgcttcttggtaatagatcgtccccaggcactaagatgtacaattttgctaatgggagaataggaaaagagtagagacgaccccctggaacattggttagttagattttaacacttggaaacatcaaaacaagtaacttttaaattttttgaagaagaagcttgctgagtttattgatacttaacaaacttatttggacagaggatgattttttttctcccttcattgctacccattacttatcaccaattttcttaaatctgattccattttctcaccaaatatatgctgcaaatatgtgtaacaactgtataaacgtgtcagattctgggataatatgatgaataagccgtactattcattaaccacactcattaccattgaacttgtcaagtcacaaaggtcccttgtagccccctggggccttgatgcagcacaatcagctatatgaactctgttaaaccactgtccttactttggttacaatttaaaagagactttgagaatctccaaactcagagttgctgttgagctggggttaacaagcagagggactccccagatagcttcatacccagtttagctttataacaagtgtagttttaggctctgtcttggcatacttgagagcacaatggctgcttcaaaacaggcatttgaactcgctgtttaatcaaattcttctttaatctaaagtgagtttctcatagagagcatatacacttaacccttgaacaatgtaggggttggggtggggagtcaaccccctgtgaagtaaaaatttgctaataacttttgactcccccagaacttaactataaatagcctactattgattggaagtgttaccaacagcataaacagttaacatatattttgtatgtaatatgtgttatccactatattcttacaataaagttagcaaaagaaaaaaatgttattaggaaaattataaggaagagaaaatatatttactgttaagttgaagtggatcatcataaagttcttcatcctgttttcttcacattgagtagatggaggaggaggaagaagaggggttgatcacagtgtctctggtattttttggtagtaaatgataaaatagactgatatctacatatattttatgcattcatggcatacgtaaccttttcttaatttttcaatatttttaggctacatgtttcatctgctagttttttcaaattgttgcaaatttccaaaatttttcttatatagctattgaaaaaaatctatgtataagtgaacctacacagttcaaacacctgctgttcaagagtcaactgtagttgcatcttgtgttttatctattcagccactgtttgattacagagcttaatctatttacacttaaagtatttatagatagggaaagttttactattgctattttgttagctttcatgttactcttatagttcctttgtctttttctttcttactgtcttcctttgtattttcttgattttgtgctttgatactgatgtgctttggttcctttctttcttttttgtgtaacttctacagatttttttttgtggttactttgggacttacataaaatagctcatagcagtttattttaagttgctaacaattgaagttcaatagcatataaaaattctaaattttatctccccccaaactttgttgttgtcataattaacatgtattcatattgtttatggggaagctggggtgctggcaagccacctcctttgctctcttgggtaaagctgggaggtagtgggtctctttcttatcatatggcactgtgttggaggcagaatcttcagcaagagggtgttctgaatctctctattagttctagtgcctctggttttgtattcgctcagggtgcaggagacttccaattagtttctgagttttcacaaagggagtttgtccttacgctgttgctgaattggtgtgtttgttgtgaggaagggtacttcggggtttcctactctgtcatattgctgacatcactctggttaatctttttaatgtggatcacttatgaaaaatttcctcaattacataatatcttcaaacaaacccattaacaaccacttgctgcgaaaattaatacatattaagaaacaaagttaggtgtttggcattagtaacagtaaatatgtactatcagtggctgccttaaaatatttttgggagttttcaagtcatagggtatgaaaagcatcatctttcatcacaggtgggtaagtgaaaactatacagttaggaaaaggatttgtatttagcttattgatagtattatgtcttttttttttttttaacaaaaacagtgttgtccaatcttctagatggcttttatcctacaccactccgctgaatgactttataaggtaatcgataacttcaatgtgacttcattcaggggtcagtttttagtcttaccttgctggcctgtcagcaaagtattttatttgccatatcagtggtatttgaaatattgtctttcagaacactggggccatctggcatttctcctaattctgtggacacttcttttgagactcttttgctggtttctcttcatcttcctgacttgtaaacacgtaaggaattccaccagaaatgattctctctctacttttatcttcactctcctggtgaagagagattagctttaaatatatatattccagtgccttccaacttttaatctccagccaaccagacctcttgctgcctatatttatacttagatatataatattcactggtgtgctaatacatgtttaataacaggcccttaatgggtaggggagggaaagagggaaaaccctgattcatacagtttataaattgtggccaattttaagctaccaatgggatatcaactggcttgcaaaattcctgaaaatttaacagttagcttgtaagaaccactagctccatcacatcactacttagctttctcaaactgaggtctcaaacattcccaaactaagatcctgttattctacttctgacctgccttttctttttcgataaatgccaaatgttgtctttcaattgcttaaggctgaaattctagaatatttttgattcctctaattccttcacatccatttgattaaacagcaaatcttgttggctcctccttcaaaataaatctaacatccaagcatttcttgccacctttataagtactaccatagtcaaagccaccattatgtcttacctagaattactacagtggccacttaactacacttttcccttttcagcttattctcaacacagcagtcagaatgatcctgtgtaatgtatgtcaaatggtattattccttgttttcgtaacttccaatcactttccatcttactaggggtaaaagccggatccatccagtgtctcataccaccctatatgatcttcatcttcaccctgttacttgtctgatcttacctcctacaactcttcctttcattcatttacatccagctacactggccttcttactgttccacagaaatgcaagacatgcatttagggtttttggactagctggtccctctgcctggggtgcttttccctcagatagtcatatgacttgctctttcacttcctttaggtgttattcaactgttaccttactagtgagggcttccctggctactctttacctacagttgtaccctttctcctcactgacatttcctacccttcttccctgcttttctctttagaacttaatattgtcttatgtactttttatcttttaaattgtttgttgtttacctcttctactaacatgtatgatttataaaagcaggtattcacatatgttttgtttgctgatatatcctcatcacctagaaccctgcctagccatagtgagcgcttaatatttttaaaataaatgaatgaaaggatgaatacatacatatatacacatataaatgggagaacttaaggatactattcagcaataaatgcaatgaattatggatatatgcaaaaatatgggtgaatcttgaaagtgtcatgctaactgaaagaaaccagacacaaatgactccatttacatgaaattctaggaaaggtaaaagcactgtagcatacaggaagcaacaaaaaaagaaaactacagtccaatattcctatgaacatagacacagaaatcatcaacaaaatactagcaaaccaaatccagtagtacatcaaaacgataattcaacacaatcaagtgggttttactccaggtgtacaaggatggttcaacatatgcaaatcaataaatgtgattcaccacataaacagaattaaaagcaaaaaccagatgatcatctcaatagttgtaggaaaaacattgataaaatccaacatcccttcatgataaaaaccctcaacaaactaggcatcgaaggaacgtacctcaaaataataagggacatctatgacaaacacacagccaacatcatactgaatgtggaaaagttgaaagcattcctcctaagaactgaaataagacaaagatgtctgctctcaccactcctatccaacatagtactggaaatcctagccagaaaaatcagtcaaaagaaataaaaggcatccaaattgacaaagaggatatgaaattatctctatcacatggacataaaggtggaaataatagacactagggactccaaatgggggaatggtgggatgggcatgagagttgaaaaactacctattagatgctatgttcactatttgggtaatgagttcagcagaagcacagcattatgcaagatacccatgtaacaaacctgcatatgtacaccccgaatctaaaaaaaaaggatagtgacataatgtaaattaatagttaccagtggttttagatatggggggaggggaaagaattgactgcaaagaattgactataaattgactagtcaaaattcataaagttgtacactttaattttattataaattacaacttgataaagctgaatgaaaaaaatctcaaattgtatatttctgtttgaacgtgtgtgtgtgtgtgtgtagagagagagagagagagatactgaaaatgagaaagataaaatattaaaggacatatacttaaattgctatttccaagagagatgaaatgtgggcagaggaaagtagatagagtgagatggtcattgggaactatttgttttgtttgaatttttaataaggtaaattacaatgttttatcaaatgtttcacagaatcattttggaagcattgtgcttaaggtctctgaaacctcatgtaagcatatgtgcatattaatggcctaatggaagtgatatttttagatatgttttctagtaaaaaaaatgatactgaaaattggaatttctggtaaaaaagaaaaaaagggacagaggaaatagcataagcagattgttcaggaagccacagtggcctagcaggaaaaacattgttctgagagtcaagatctgagtttgaggccttctctacatctgtatcatgcagagataccttcagtctcatctttcaaactagagctactactcgattagtgttttttaaacaaagatctgcaaagctctgttgcaggcatcttattaaatcggaatagctccctgttaatgtgctctgtgtagttagcttctatttttgtttttatttcaagagcagtgtgcctaataagtttgaaaatgaattggagatgtttaatgtctctcctgctataaaatcacttttatggtttttaataaaaaagcccttaagatctatacataacttggtgagtggaggcccaattctaaattaataccttcaaccatactactcaaatctagattacatcgaaagtgcccagcctagagatgaaaataaatgacctagtgtgagttagcttccttggttacttctccttcactcaccctgaactctaagttatcaggagcccaagaatgtcacttaaaaagggcattctcatcatgagattcaattgaaggctacagctatgccctggccctgtactctgtctagcagataacacttttcacttcagctttcaaagtaatctttcagccttgacgctcatctcagtcatcccttttgctaaagttcaatttgaaatttctggtatctgatcattcatcacctgtccacagtctatgctgacaatttttccatcgatatatgagagagtgagagtctgggagaaaatagaacttgaatgaaacaaaatgacatcggttagcctgaaaacctagaaaccagtactaagcttcacaggaatttagatttctggttagattaagtaccatgagttaagaagtaacaatataaactaaagtcttaaattgggagtataatgtattcatgaaagttaaggatttttgacaaatggaataatattgattttaaaatgtttctctaagatatctgtaaatatactttttgcattcaactctttcaaaaaatagaatggcctctgtttttgacattaagtggaaaagcattcctattggcctcgaagcatttacattatatgtgtaaacatatagataagtggccacaacaaattttttttttgtttgtttgtttgttttgctgcttgctccaattgtgagctctaaaatttaaggacacttaaatctaaaatttaaaataaaatgaatgtaaatgttaaatctgtatgttttttaaaacattttggtttttttttaaactaagatgactgctttaaaaggatgacaaatattctaagtgaaaatctttgcaagattgacggtttgagtgaatattgtgaacttttcagtgttttgtgcatgctcaaagctagattagttcttgttttcagattttgtacaaatgaccccaggctgtattgttcaacacctcctttgaaagtggaatctttcatggctattttattttattgaatttgtggctgatttcctaagttcttggagcttaatatgagccatgaaatttttttatgagatttgttactgaaggttttagattcagttggtggaagagcgaggtatacagcagggtgcagcagccatttgtggaggacctattgggaatccatttactttctcttagtaagagcagtgtgtttgtgtgtgtgtgtgtgtgtgtgtgtgtaattttatgcgtttattttaaattaggtaaaaaattggagttggagggagaggcagatctaaaaattgggtggaaaccaccaaagttccttggaactaaattctcaagatatgtgtaatagcagatgagggagacacatcaaaatgtttgccaggatttgctatctactgcaagggattatctttggtgggcttaaagctatttagccctgtgttatgtttggattgagggctctgaaaactcctattacataaggaatttcatccttaagccaaactgtaaatgtgaacagaaagcttaattagtgcttcattgtatcaggattactgagaaattagtcatcagaaatttgcttggtaaggatggaatcacagtaaagtaaaggtggatagttttgagggaaacataatttagaccatgttgtttgatgaatcatttttgtcctacaacaaagtacttctttgttcgttccttaaattcagattgtcttttccatgtagtatgttaattaattatggataacttctggttttattctgttatgttagctgactgtcttcttcctgactgtgctctctctttagctaaataataatataattggttaaaatttggctttttatattgtagttgtattacagtcttgccttccagagattacattcaggtaaacttaattagaattttagctttctccaattttttgaactgtttttatattttcttggtttattgccatagatggtaagttattgtgtataggttttgtttgtttatctttttgaaaattgccttatttttaagtagttatcttatttttgaggttcacctttttgctactcctgtgtgtcaatagcaggtttatttaggtacccatagagtacttctgaggagctaaagtgaaacaaggaaaatatatttaagtttcttgtttggaacatggattatttatatgtggccttggtattataaaattatctaaaaacaaggctataatgatatcaccttagaagtagataaatgtttattgagggccagtccaggctaaaaactgcaaaatttaaatggatctaattagtcttctgtcataattcatgaatgtgtgtctggtttccggtaggctacctagaatagggttctttagaagtagaaattagtgtaataacttaaaatagggttaagatctacaacttagagagtacttaggcattcaccttttacttctcagaaacaaatgccaactttaatcactgagtaaataaagaaaaacacacaattaggtacagcatgtcattgattaagtaatatcctttcctcctgttacctattagatgtatttcaggttttaaatataatttctaaattttatggtgatacctaactttattatcttttccaaggcccagacatcattttggtattttttaaaaaatctattttcatctcattatagttaaattttccttgaagtgaaatcagttaaatatttaatcttcaacacacttgcgcagccctgaaagttcaataaaatgtaattgtaattaatgtacatttgtttaaatagaaatatgtgcatgaagcaagtaccttaccaatgtacaatctggcttgtttttgggtaaaacaagtaacttctcaaacgaagacttatctctaactttgtgttttgttttattgacatagaacacctttgcacctagcctgtgctaatggacatacagatgttgtacttttcctaattgagcaacaatgcaaaataaatgtccgggatagtgaaaacaaatccccattgattaaggtatgccatagtttttctttttcaattggaatgtgtttgagttctcctagttaatttttgttgatttttcatgttttaaaacatagtatcaaacattaatttatcatatcccaagtagtaaattggttactcatctactcttgttgcattaacaggcagtacagtgtcaaaatgaggattgtgctactattcttctaaactttggtgcagacccagatctgagggatattcgttataatactgttcttcactatgctgtttgtggtcaaagtttgtcattagttgaaaaactgcttgaatacgaagctgatcttgaagcgaaaaataaggtagttttctattaaagaaaaaaatcctgtattttagaaagcaactgaagagcatatttcagataattcatctatgttgaaatatatgttatataaagcatgaattttccaaactaaaattggggagaaagagaagagattatcaaaaactgataaaatatttcttctcttgaactctttctatattttattgcagattgtaatcctgacctccaaagaaacactatatttaacaactataattgtttaacaggccataacaaatgaggaatatttaattctcttataactgggtattgataaaaatcataaaacccaccttttttctattttattgatatactcatgaataataataacagggttgaaatagcaaatgacacaatattaaaattaatctaactcttctattgaggcattatgaatagccgatgaatttttttaaaaagtgtattgagccgggcatggtggctcacgcctgtaatcccagcactttgggaggccgaggtgggtggatcacgaggtcaggagatcgagaccatcctggctaacgtggtgaaaccccgtctctactaaaaatacaaaaaattagctggtcgtcgtggtaggcgcctgtagtcccagctgctcgggaggctgaggcaggagaatggcgtgaacccgggaggcggggcttgcagtgagccaagattgcgccactgcactccagcctgggcaacagagcaagactctgtctcaaaaaaaaaaaaaaaaaaaaaagcgtattgatactttactgatattttgtccacagccaaaataagtgccagccttggaagtttaagtgaaacccagtggaaatctgaatgtgacaatattatgaaatgtgaattgacagtatgcaatgcttacattaaatgctaagtgctcatcacttacttattctaggctgctcttacctacaatttgaattaagcctaaaacaggaacttaaatttttttgtctggctcaaccctgatttgttttcttggtctttgaaatcacatttttttatgtattaaaatcttttaagagttaaagtgtatattcagaagttcttatgcacacatattttaagttgaacttaaatctaaagagcatgaaaatttgctacaatattttaatcatttttaaatatttttttcaggatgggtatactccactattagttgccgttattaacaataatccaaaaatggtaaaatttcttctggagaaaggggctgatgtgaatgcttcagataattatcaaaggtataattaataaataagatagcacataactaaagctacctgataggattgtgtgtgtgcgtatgtgtgtgtgtgtgtgtgtgtgtgtgtgtccacaaaacacaatatatatgatattgggaaaatatagaaccataagacccgtaggatgtatgctcacatgcttttggacagattacctaaacttttaggatttatttttccctttgtaaaatcaaacagttgggccaggtattaactggttattattattatttatcatttattattagaatttaacattagactcttacatagatgaccaactgttgtagttaaatggggtcaggggacccaaagtcccaagacacattccttcatggaattttgagacatatttttgaaaacactaggcttccaggaagaagagattgaaaatgattgagctagctgcttcctaggtactgttcatgtttagactccatgatatgatctgtgactggcacacttttttgagcagatctgctgtattttttacattgttgctttgactctttctgatagaggccctacatttgagtagtaaattgagaagactgaatttttaaaattaggcatgtttaagatctttacatgggcattcatttctatctcttgctccagaacagcccttattcttgctgtcagtggtgaaccaccatgtttagtaaagcttcttcttcagcaaggtgtggaattatgttacgaaggtattgtggattcacagctgaggaatatgtttatttccatggttttactgcgtaagtgatactgcatgtcttttaacaactgtatggggtttgattataaggatcaaagcctaagccccaaagtacaaggctggaataggctcaacagtaggggtaaccacatacaaatctgtgcagggattcttgattttctctgtttgtgggttcaatcaatataagggctacagatgggctgaatatgcaaataaactaccagaggcaggagcattggaagtgtgccagggtagggatttagacacttgtaacatagccattaataaaacatataggtgatagagttggacaaaagatgattcattcacacaaagcctttcattgcctttagatattattaatatatggattgtattcatgttttgaatattattgttaacatttcattagctaaccttagtttggtaagtgttcagaattctaaagtacactctatttacacccaaaagaaaaactattttcatgtatgaatacaaagttctgatttttaatagttaatgagaaaattagatacgatgtacaaaaatttaatttatagcttatgaatttaacttatagataatttgtagctaacttaatttacagcttaatgaagttaaataacatacaaggtattttctctataattttattttaagagcaatttaaaattataagtaggtattttttcagtttttattattcttcttccactgctttattcacattttaggaatactttttaatcattaattccatatgaaaagcataggtgggagggaagaaaaataatcacatatacatacagatgtttagtcttaatttaactttagacacaaaagaatttttattctattaaatgcatgaaccataattgagtaaatataatattttcatcttcgtaatacagaacgtgtactttgttttactttggtttaagcagaccatatgcataaaatcttaatgaaataaacatgtaaattattggtgaatatccaaactataaaaggattcttcactctacaaaagtgatccctaatgtttcttttatgtatgatttttttccatcacttaaaaagcttaggtatatgaaactagaagacacatgtatctgtttagtaatgtatctattggtcaaaaacagaacttgtatatttaaaatacttatttacatatatgtaagcaagtctcatgaaggcattattggatagtttgatgagaaggaaatcttacaatcttcctttatctcccccaaatggcttttagaacagaaaattctttttgtagattgctccatcattaattttaaaatacaaacatattgaccatgaagtttttgtcctcttaatagattcatattttcaatgtcgaaaattgtaagagaattacatttttttttcttttttttcaaagaggtgagagggaagaaaagcaacttcctaatgattaagcaattacctctgggatgtggaaatgatcaacatttaataacaattgcaagtgactcttcaaaactacaatcttgtcctttcacagtatttgcccctctttgcagtgggaactaagctttctgtaattgtgacttttgttgctcaagtagctgttgcctatgtaacgtacttaagaatgtgctgcttcataacatcatttgttggctctctatgtagattctatggcttagtaaagtggaagcatagacaatattcctcatagttttaaaaaattagtgaaacacttccaaatgaaggaattatatttaagtatttattttatggttagccataacccatgcatttcttcatttctctcattaaaattcagaagccatatggctcttttctgtcatggagcaaaagtatattcatcactgggtgtgtttcagtccctgactgagttaattgtcttcactttgttaatttactattaaacctgagagctgtgggctgaatttccccctaaaattcacacgtgaaagccgtggcctagtacctgtgaatgtgaccatttttggagatagagcctttaaaggggtgattaagttaaagtgaggccaatagggttggccctaatttaatttctaacctgggtccttataaaaaggggaggttagaacatgcagagagacacaggggtgctcatgctcagagggatgacttatatgaaaaggccagtcatctaaagggcagtcacctaaagcaggtgtccttaacccctgggccatggcccagacctggtccttggcctgttaggaatggggcagcacagcaggaggtgagctgcaggccagcaagcaatgccgcctgagctccgcctcctgtcagataagcagaggctttgggttctcataggagcacaaaccctcttgtgaaccgctttgcaaaggatctagtttgtggtctccttatgagaatctaactagtgcttgatgatatcaggtggaacagtttcatcctgaaacacccctgtccccctacttctgtggaaaaattgccttccacaatgtcagtccctggtgccaaaaaggttggggatctctaatctaaagaacagttatctaaaaggcaaataaatgcctgggacagattttcccttaaggacctcagagaaagcctaccccactggcacctcaataaatgtgcagccgacagaaccatgagaaaattagtttctgtttaagctgccccatttgtggtgttttgttatggcacctctagcaaatgaatacaccaactataaattaaagccatttttactatcttgatagtggcttttaaaaaaatcatatttgtgatagcaggaagaaaagaggtgccagagaatgggagtacatgaaataaaagtggtgtctgttgacagagttggctcaagaggaagcttgtcctcaagtgtgttacattcttggggcagcattggctggtacctaaggttttgatttgatacttatatgttaggaattaaatttctatgcatgctggcattcacacgtaatttcctttatagatagatacccacaattcactgcgagccatggaaagaagaaacatgctaaatagacaccttattcttggcactacatgtgactaaaggaaggtaagattgctaactggattagtgtttttttcttgttgctttttatttgttaattttttaggaaaggaaacaactttcttaagtaacatttaattttaaaatggaaattttgtattattttgaaatgtcaaatatttttaagaactattcttttttatttatttatttatttatttattatactttaagttttagggtacatgtgcacattgtgcaggttagttacatatgtatacatgtgccatgctggtgcactgcacccactaactcgtcatctagcattaggtatatctcccagtgctatccttcccccctccccccacctcacaacagtccccagagtgtgatattccccttcctgtgtccatgtgatctcattgttcaattcccacctatgagtgagaatatgcggtgtttggttttttgttcttgcgatagtttactgagaatgatgttttccaatttcatccatctccctacaaaggacatgaactcatcattttttatggctgcatagtattccatggtgaatatttgtgattaaaatattctgacactgtgttggctgaaaatgtaaagatgtaatgtaaaaatatgcttaatgattaagatcattttttaacccattgtctcatgtctagctataaaaaacaaaatttttgcacatatatattttaatagatgaaaaactatcataaaaattttaattttattgtaaaaatacattaagcactgttgatagtagttaatataagatatacgaattaattatataaaattttaaagaaagtaacaatatttgtaaagaattgaatttactgtgcatcaactaaaataaaattttgttattcattttcaagaatatatagttattggccgggcgcggtggctcacgcctgtaatcccagcactttgggaagccgaggcgggtggatcatgaggtcaggagatcgagaccatcctggctaacaaggtgaaaccccgtctctactaaaaatacaaaaaattagccgggcgcggtggcgggcgcctgtagtcccagctactcgggaggctgaggcaggagaatggcgtgaacccgggaggcggagcttgcagtgagccgagattgcgccactgcagtccgcagtccggcctgggcgacagagcgagactccgtctcaaaaaaaaaaaaaaaaaaaaaaaaaagaatatatagttatttaggtctgtaaaaattagcttttattgacaagtatgttttacactgacttttgttggatgagagaaaaacttttagaactctcctctgtattcactagcaagcagactcctccactacaattcacccccagtgtaaaatggaagaaaataaaaaggacatagaaggagtgtggaggcaatagaagatcatataaattctcaactattcaagccctctccatcccccatccccacaaatctatagtgataatgcttacaacaatgtttggtcctatcaattccaggtgaataaacttaggggagaatttctctgaattaccttttttttttttttttttttttttttttctgtttttgaggtggagtctcactctgtcacccaggccagagtgcagtgatgcaatctcagctcactccaatttctgcctcccgggttcaagcgattttcctgcctcagcctcccaagtagttgggattacaggctccaccaccatgcccgactaatttttgtatttttagtagagatggggtttcaccatgtttgccaggctggtctcgaactcctgacctcaggtgatccgccagcctcggcctcccaaagtgctataattacatgcgtgagccactgtgtctggccctctgaattactcttaatgtatactcttatttcctcttctcctgcacctctctctctcttttaaatgtctgtgcagctctaagaagtgaagaatttctgtgatttacacttcgtttcttaagggaactaaagcagtagaaactacagaaaaatcattgctacattttgagtgcctcttgagggtagacatttaaaaccaggctcactcattttattttggcaagtttgttcacagttcatagtgaaatgttaatcttaattaatgttttaaagcgtagatttattgtgtcaagaaaattaccaaaagatgttgcaaaaatggtgaacataaaaagttatatttctgtcaaattcaaaagagactacttaattatttaaaaattactattagatatagaaatgctaaattataattgtgttgtagctgaggcatataatttaagaaatacatgtagaaatggaaatatttggacgtaagtgaagacattataaatatcatttgtttcctagatatggaacccatttctacaatttctttgccgcttccttgaattggaaaaatgtactttgaaagaaccgttaagtgaactattataatatttttgctgactacccagttgaagaaaagtttgttaattggatgggattttttttttttcacgttagaagacatgaagaaattttaaaagataaacatctatattgtgaaccatcagctgaaaagataaatttgtgttcaatatataggcagaaaaaaatttgtgtcaaaatgttgaatggaataataatgaggaaactgtgttaggcatgtattaaaacatttaaataaaataaaaatacatttcagctacaaagtgaaggaaaacattataaataatcctgtataaatcaaa

SEQ ID NO: 10 - protein, 254 aa, Homo sapiens
MNKLFSFWKRKNETRSQGYNLREKDLKKLHRAASVGDLKKLKEYLQIKKYDVNMQDKKYRTPLHLACANGHTDVVLFLIEQQCKINVRDSENKSPLIKAVQCQNEDCATILLNFGADPDLRDIRYNTVLHYAVCGQSLSLVEKLLEYEADLEAKNKDGYTPLLVAVINNNPKMVKFLLEKGADVNASDNYQRTALILAVSGEPPCLVKLLLQQGVELCYEGIVDSQLRNMFISMVLLHRYPQFTASHGKKKHAK

SEQ ID NO: 11 - DNA, 10343 bp, Homo sapiens
  5'UTR (3599)..(3713)
  exon (3714)..(3775)
  exon (3891)..(3992)
  exon (4191)..(4297)
  exon (4573)..(5218)
  exon (5938)..(6287)
  exon (8456)..(8916)
  3'UTR (8917)..(8936)
gcatgtatagaggatgagaggaaggtacggtgaaggagcttagggaagacttccgggaggtgacggtgtctaagccgagtcttgggaaacaagcaagagtaagataaactaaaatagaaaaatagaagtttcagataaggcatgtagttttaaaagtactttaccggctgggcgcggtggctcacgcctgtaatcccagcactttgagaggccgaggcgggcggatcacgaggtcaagagttcgagaccagcctgaccaacatagtgaaaccccgtccctactacaaatacaaaaattaactgggcgtagtggcgcgcgcctgtaatcccagctgcttgggaggctggggcaggagaatcgcttgaacccgggaggcggaggttgcagttagccgagatcgcaccactgcattccagcctgggcgacagggcgagactccgtctcaaaaaaaaaaaaagaaaagaaaaaaagaaaagtattttgccaatgttaaatacctggtttttatcattgtgctatagttatgtaagatcataacgttaggggaagatggataaggaatttatgagaactctgtattatttttgcaacttttctgtaagcctaaaattagttcaaataaaaagtatttaaaaagaaatagaagtttcagaccaaaggatcagcatataccagggaaaggaagaatggacagcatgtgggaggtgctgtaagaactgcaatcagtacagtgtgtcgggagcctagggaacatgtgaggaaacattgtgagatgaggctgaagacatggactggagaactttataaaccatgttaaggaatttagattttatttttgggatgatagctataaagaattttatacatagattgatagttatacagtaactttgcaaaagaccaaacaagctgataaggcccaaactagagtagcaaaaatgcagagaagtggacatgtggatttttagaaggtagatcaccatggtttgatgattgggtggatataagaggaaaataagaggaagaattaaaaactaatgcttagtttatataaattcaaaaacaggtaaaactaaactgtgatattagaattcaggatagtgattattcttggaaaaacattgactgaaaggggcagagtggggctcctgaggcactggtgatgttctgtttcttgatctgagtgcttggttatatgggtgtgttcactttgtgaaaatgtattaagctatatacttaaggattgtacacctttctctgtgtttgtttgttctggttactatgctatgtgacaaaccaacccaaacttagtgtcataaaaacaatagccattttattatgtgcacaaattctgggaatttggacgagatgcaacaggaatggcttgtctctattccatgatgtctggggccttatttgtaaagcttgaacatctagaggtggtttgaggctggtggctggaagcatctggaggcttcttcagtcacacatctaattcctgggctgggataatgaaaaagctgaactcattgggcaaactgtcaaacagaacttctcacaatgtgatgggtaggttccaagagggaacattctgagagggagctaccagacaacacgcattccaagagaaccagagggaagctgcatggccttttatgatctagccttagaagtcacacaacatcactcctgctatacaaactatcacaagggagtggtgtcgaagaatttgtgaccattttttttaactgccacaacattatacagtaaatagtaataaatgcttgtcataggtttttttgctgaaagggcatagataggaattctagaagaaaaagtggaggaagataatgagcttagttatagacccaatgggttgaaggtgaccgcgggatacccaagtaggaacatccagtgagcagttagtcatatagataactgaaactcagggagagttctcgggagccactatatgagaaaggaagtcctgtgggtgactgacgtcaatcagacagagttaggaggatggcaaaagtagaaagcctagaacagaatccaagaaaaaaaaaaaacaccatcatagaaggaatagacagaggagcttatgaaagacactaaaaagaaacagcaaaccaagacattatggcattacaaaggattttattcattttgttgcattactttgaatgttgtctttttattttaacaagcgtaatactttgcaaaaagaaattaagaagccatgggaaaagagagtttttcaaaatttaattagggaccacaggtttttcttctaaaacacactccaaaaacacaaacctgattttatcactgaactgtgaaaaactcttcacaggttctctattgccgttgggtaaaatccaagctttataacatggctgacagaactcctcctgagctggcctctgtctatcattcaacctcatctctcaccactacccgctaggccctctaaaataagccaattgatatttgcccagtcacccacgctttttgatatctctatgcctttgcccactctgtgcattctgcctctagtgctcttcaccctcccatctctgtacccaactcctattcatcctgcagaacccaggctctgtagggccacttcatgtgtactataatagccttccgtgtatccagctaacagagtactcatcagcagcctggcaatgactgctgctgtttagttacctcatgtgtaattacctgctggcctgactatttcacctagcagactgtgagcttctggagaagggggagcgtgtcttattcatctccaattcctagtatttagcacaatattggcctggcacacagaacacctgcctatgggtgttctgattttgatttgttgactgagaaagatgatagcagtgaaaggaacatcaggttgagggagaaattgtagggtttttgtttgttttgatataggagatattgaagcaggttcacaaaaagagaaaagttgaaagattggggaccataaaacacatggaatggttggtaggatcaggcactagaagtcacaagaaggatatgaggacaaaagcaccataggatggcccctatcacactacctatgagaatggtgtgatgggggaaggcgtatgtggaggtagataagggtaggaagtaggttacaaaaatagagctcacttctcatgtgagaggcatctctttgtccctggagaatagtttagcacctgacatagataagccattcagtaatagttgttaaataaataaatagtgaggcccaaatagaatttgcaaagataaaacagagtgtttgatcctacactaaaactgaggtcttctgacccagaggacacctatgtagctcagttgctgtggaaagaggggaggaggaaaacagagacaagactcaggcttccctctgaggcatgcacccccaccttctccagggatctcattagaggtgtttagctgggcaggtgtaagcccaggccctgggagacagggcagagtgctagagctagactgtctccaccccttcagtagcgctagctctggttgtgttgctaagagccccaaagacaaagaagtcacagcagaagcccaacagcagcctccttcaggcagtcaggcactagtgcccaactccagaagtcccctacaggcagagagggtgtggacatctcacaccccagcaccagaccacagaaccatgagccaggacaccaaagtgaagacaacagagtccagtcccccagccccatccaaggccaggtgagaagtcctggtcccttgtgtgggatctctcctcattcctcttggtgccccagtcacaactacagctttgaatgcctggtgaataaatgaagcaagactttctttcttacaggaagttgctgcctgtcctggacccatctggggattactactactggtggctgaacacaatggtcttcccagtcatgtataacctcatcatcctcgtgtgcaggtatggcagcggtgctaagggaggggctggaagccaaaaagaggactaaagagaggtcaaggagaagggcagacccttggtggggcaggaggagcaattcccatgggagggcctgaggcagagggttaagggccctggggagacgcctcgcacacagagggtgcccttaattcaatcatgcttaaccctgccctgcagagcctgcttccccgacttgcagcacggttatctggtggcctggttggtgctggactacacgagtgacctgctatacctactagacatggtggtgcgcttccacacaggtcagtgggcttctaggaatgaccctttgtcccacattcccttcctaaagatagccacttaagaagtaacaagaaaggcacccccaccgtggtagcaccttcgcgtgcctctatgcctgacagcatcccagtgctcaccccggaaagccgggagcagagttatgcctggctccactctgtccttcagacagtctccctggcctgccctgggcagctcatgctcagcccaagcttgactacagcaggtccgcttcctaccggctccctctccccaggattcttggaacagggcatcctggtggtggacaagggtaggatctcgagtcgctacgttcgcacctggagtttcttcttggacctggcttccctgatgcccacagatgtggtctacgtgcggctgggcccgcacacacccaccctgaggctgaaccgctttctccgcgcgccccgcctcttcgaggccttcgaccgcacagagacccgcacagcttacccaaatgcctttcgcattgccaagctgatgctttacatttttgtcgtcatccattggaacagctgcctatactttgccctatcccggtacctgggcttcgggcgtgacgcatgggtgtacccggaccccgcgcagcctggctttgagcgcctgcggcgccagtacctctatagcttttacttctccacgctgatactgactacagtgggcgatacaccgccgccagccagggaagaagagtacctcttcatggtgggcgacttcctgctggccgtcatgggtttcgccaccatcatgggtagcatgagctctgtcatctacaacatgaacactgcagatgcggctttctacccagatcatgcactggtgaagaagtacatgaagctgcagcacgtcaaccgcaagctggagcggcgagttattgactggtgagaaggcggggttccagaccaggacagggaccagtgtaggtgatggaacctgagggaggtaactgggtccttagtgcctggtgagccaggcaaggctgtcaaaatgtagcattcagccgtgggtttgctggctggggcttggaaaaagggaacttctttcaactgagggaatcaggacttgggggaggggtaggtaagagactgatagggagaggagctcatactcaaaaaaggataatatggagaccagggaatgggaagtgccactgcctggtagggctcagaaggctctggaaggagtgggtgaagaagggcaatcccccctgagaatggtcagcaacaagatcattggctacctatggtgattcatactgtggactgaacaaaaggaagtgtcacaaagttggggaagtagagcagagggtccccagagaggaggggcccttggtggctgaggtagctaagggtaggggtggaacaagacatcactgattggtgggtagggtagagcctgataggaggtgaagggttatgtaaagtggtagaggtgtctatgccctggaaaacaggtaatccaactgtcaggtactcccatgacccctgttagatctcagtatggtgggattcttggctggagctgagctgagccctgaaggaagggatggaggcaggcacataaagggctggtaaggaaatggcactgtccttactctcaggtatcagcacctgcagatcaacaagaagatgaccaacgaggtagccatcttacagcacttgcctgagcggctgcgggcagaagtggctgtgtctgtgcacctgtccactctgagccgggtgcagatctttcagaactgtgaggccagcctgctggaggagctggtgctgaagctgcagccccagacctactcaccaggtgaatatgtatgccgcaaaggagacattggccaagagatgtacatcatccgagagggtcaactggccgtggtggcagatgatggtatcacacagtatgctgtgctcggtgcagggctctactttggggagatcagcatcatcaacatcaaaggtgggtatcccagtatttgttccagggacaaggatgggtggggtaggggggaacagcagagcccagtgctgggaccagatagtacttcaggcctaaacttctgattgaggaaacctggcccttctctgagtcactagatggctcaggagaaaaacaacacatagaggatccattccctgagaagaagctgagccaaggccagtgaacagggtgggttcgtggaagagagagtagacttgctctgtggatattcacctgaagcaccaatagactagtggacagtgatagagataataataataataatagctaatatttattacctgcttactgcatccccttttctaagtgcttcacatgatattaactcattacattcccgcagcagttctataagataagtactattcttatcccaattttaaagataaggaaatcaaactcaaagaagttgggtaatttgcccaacgtcgcacaggtatacacatgtgggatgagtggaaaaaacaacctttttacagccaagtggaaagagaaaggtagaagagaagaagttcccatttactgaccatcacctctaggccaagccaggtactacctactggcttgctttttcctctcatcagccctgtgcagtaggaattgttatgcctaatcacaggtattaggcatgaggtcgtgcaagcaggaaatcctgcaaatggggtaagcacactgtcatggaccgagaagctggatgtgctctggctctctcagcatgaggattctaccctcagggattctgaaagcctcacatctgtcctccaatgatcccctcaagctccacatcctgtatgtggtaggatgctgtctgtttgactttggacaagtcatttccctatttaggcctcagtttaatcacctatccaatgaggacaataataaaaacccaatgagttatttgtgagaataaatgagctatgtgagtgaggcatccagcgcagtgcttggcatacagcaagtgttcaacaaatagtagctccctttcccttgtccaaggtccttctagctctaagactttgcagcattcagcctcacctatctccccacccattctccaccaacatctttctaaactgcaaaggatatcatacagctccctgcttaaaatacttcaatagtttcctactgccctcagcataaggcctgaacttcatgtcatggcttatgagacccagtgtgacctagatctcccctctctccaccctccccacactctgcgcttctcgcactctgaactgcttactattttctgcatccaactgactcttttctacccccttccctctgttcctgctccttcctctggctagattgccctatccccacttgtccccctcctccccctagttacctcctactcagttcaggtgtatgagactgttcttgcatttctataaagaaatatgtgagactggataatttataaagaaaagaggtttaattggctcacagttcttcaggatttacgggaagcatggtgctggcatttgctcagcttctagggaggcttcaagaagcttataattgtggcagaaggcaaagggggagcaggcatgtcacacggtgaaagcaggagcaagggttgggggaggtgccacactttcaaacaaccaaaacaaccagctctcgactcactaactcaaagacagcatcaagccatgaaggattcgcccccataatccaatcacctcccaccaggtcccacccccaacattggggattacatttcacatgagatttgggcagagacaaatattcaaattatatcttaggacatcccttcctccagacttccctaaattccctgccttacggtttggtaggggctctttgcctacctttccacagcacctgatgaacatgtcttcactgcaccagccatactgttatataactattccaatatatgtgtatctcctctagactgtgaattatttgaggcaggtcactgatacctacccagcatggagcctggtccccagtatgttactaaatgaaagaattaatgaggcagaaggagaggctcagaagcacaaatatggaggtgaaggtcctggttcaggagtgaaatgccacctcctcaccctcctactaactgtcctcccatctctgcccatgagccacagggaacatgtctgggaaccgccgcacagccaacatcaagagcctaggttattcagacctattctgcctgagcaaggaggacctgcgggaggtgctgagcgagtatccacaagcacagaccatcatggaggagaaaggacgtgagatcctgctgaaaatgaacaagttggacgtgaatgctgaggcagctgagatcgccctgcaggaggccacagagtcccggctacgaggcctagaccagcagctggatgatctacagaccaagtttgctcgcctcctggctgagctggagtccagcgcacttaagattgcttaccgcattgaacggctggagtggcagactcgagagtggccaatgcccgaggacctggctgaggctgatgacgagggtgagcctgaggagggaacttccaaagatgaagagggcagggccagccaggagggacccccaggtccagagtgaccccatccccatccccaggattcccacctcctagtgaatccagagttgtagtaaagcctaactgctgcaactctgtcatcctgtctgcgagatcacagacacaggagcgaattggtctgtagatgcccagctagagatataggagtttaacgcacattcagcccccacttaccagtacacacacacacacacacacacacacacacacacacacacacacatttgctcatagacctgttggccccaagactgtgcattccatctaaaatgctctggaatttccattctcagagcacacagcacacatgctttctcacaagcaccgatgtatcttacacccacataatatatacacattcagtcatgcacctcctaaacacacatatgctgacagtcatacactgatagacacagatgcccttcacaggtgtgcacacacttgtgaaaacacaaaagcacaccctgagccctctaggtctaagatgtcttttgaatgtttcccatatgggcgattcacaagtataccctgaaagttgcacttcaataaagtatttgcctcctccctaagcatttatggggctggaaagaaaaggcaaagtcaatggtgggccaggatggattctgtctgaattctgaagtctgaagcctgaattctgagtcaaagaggtgatgagcatgaactgtgtagtagctagtgggttagagtcagagacgaggtacctgaagaatagagaatcaatactcagcctaggcaaagcaggctctcacatcacactgctgtaagagtgcccatgcacactggcctttgcatcccacaccggagcatatgttctcgatttataagctctgaggggtttcatctagttaaaagggcccgagcagatacttcttctttttcttccctctggccagccctggagcctggatccagggcttccctgtgttcagggctgattccaagaggagaataattccattctcccaacagaaagagggtgaatagttccaacaggaccgttcacctggcccagccctaccatgacagttgttggaactggtgttggtgctggtggaaatccagcccttcttctttgcacagtattccaaaatataggggagagtagaaactaggtgcaatggaatattacggtcagaggcaattagagatgagggtgttgggaattttggagttaaatctggtgtacttggaaggaggtctgcacttggggcaggaaagatatcataggttctatggggaggagtctggtatcatgtctgaaccagattcaccctgagtcaccactgcgctcctccagggcctggccagtcttgaagtctgagctgtgccaagtagtagtttaaaaggtatccaggatttaacttatagatataactgagtgatgtgtctctactctcaggggagatta

SEQ ID NO: 12 - protein, 575 aa, Homo sapiens
MSQDTKVKTTESSPPAPSKARKLLPVLDPSGDYYYWWLNTMVFPVMYNLIILVCRACFPDLQHGYLVAWLVLDYTSDLLYLLDMVVRFHTGFLEQGILVVDKGRISSRYVRTWSFFLDLASLMPTDVVYVRLGPHTPTLRLNRFLRAPRLFEAFDRTETRTAYPNAFRIAKLMLYIFVVIHWNSCLYFALSRYLGFGRDAWVYPDPAQPGFERLRRQYLYSFYFSTLILTTVGDTPPPAREEEYLFMVGDFLLAVMGFATIMGSMSSVIYNMNTADAAFYPDHALVKKYMKLQHVNRKLERRVIDWYQHLQINKKMTNEVAILQHLPERLRAEVAVSVHLSTLSRVQIFQNCEASLLEELVLKLQPQTYSPGEYVCRKGDIGQEMYIIREGQLAVVADDGITQYAVLGAGLYFGEISIINIKGNMSGNRRTANIKSLGYSDLFCLSKEDLREVLSEYPQAQTIMEEKGREILLKMNKLDVNAEAAEIALQEATESRLRGLDQQLDDLQTKFARLLAELESSALKIAYRIERLEWQTREWPMPEDLAEADDEGEPEEGTSKDEEGRASQEGPPGPE

SEQ ID NO: 13 - DNA, 117822 bp, Homo sapiens
  5'UTR (1)..(31)
  exon (32)..(95)
  exon (2735)..(3331)
  exon (4661)..(5281)
  exon (6369)..(6929)
  exon (7714)..(8271)
  exon (10485)..(11060)
  exon (13623)..(14192)
  exon (21228)..(21571)
  exon (21657)..(21735)
  exon (26173)..(26327)
  exon (28757)..(28849)
  exon (30708)..(30761)
  exon (32208)..(32279)
  exon (32363)..(32389)
  exon (32728)..(32772)
  exon (32866)..(32919)
  exon (33948)..(34010)
  exon (38032)..(38097)
  exon (39424)..(39477)
  exon (46598)..(46633)
  exon (48569)..(48631)
  exon (50316)..(50378)
  exon (61488)..(61550)
  exon (66152)..(66214)
  exon (66986)..(67036)
  exon (74257)..(74292)
  exon (75366)..(75428)
  exon (81319)..(81381)
  exon (82499)..(82534)
  exon (82654)..(82690)
  exon (84658)..(84669)
  exon (88736)..(89229)
  exon (98343)..(98439)
  exon (101304)..(101975)
  exon (104670)..(104763)
  exon (114869)..(115064)
  3'UTR (115065)..(117822)
atttgaagttgaagatttttcaggtcataatatgatgttgctaattttgttcctcgtgataatttgttcccatatttctgtgaaccaagattccggtaaggaaaaactggaaagaattcttaattttgattatagaaaatagataatacatgagtttgacctatttaaaagttacaagttttgtatcactttgttttgattttgatggtagtgagattaagggcggtaagtcaaattctttgtaaggtcactccatattcctttgaagatcatttgtttctggatcttattccttgttaataatagatatgagagctgtcattttgtcctgcttcaaccccttttaggtcttctgggaggttgcataaaaattctgttaatattaggctcaggcctggaaaacttggaatgtcccatcctaattcatttgtgtcaaaagggtatcttggtttagtgtccagatttgctccagattaaattatttggctgcttattgtgaagaaagtgctttttccctggagagaaagcttcatagcactgccttctgtctgttggcaatctctgtcctgtggacttaagacactagcacacccttaaccacctcaccatctcctaaataattggttcttgtccagagcaacttacattggcttttacaacttcctcgaggacactgaccttgtaagcaagttttgtgaagacataaaccagactttgccctgcaaacatcttcctttgatgtatctctaagccttgagcttctcaagtagaagccatgatttttcctccattgtttcatggttcagacgtagtgatggaccttatcagaacctgagtccgccttatgtgccactcatctacatttcctttctccacaaaagatgtagggcttcattcatgaatagaaagtcactggtggtcacaaatcaagccacccacggcagggctcccctggcagtcttcacagggtttcaggcttctttgggaggaaggtgttgatacactctcacttatttcttcccctgagatgctgctggctgtataatcatgaaaagaatctcagagtggttagatttgggttatttaaaagacaagaaattattttacccattatgcctcgatcagatggccataaaaggaatgaaataacacacaggtctgccaaagctggtttcccagccagtgtagaaaggaaaagattgaagttattctaatttgattagaacttacctagtaaccattttagataattggaatctcagagtgaggaggtaccttagatgttttctagttgaatctactttttttttttttttttttttttttttttgagacggagtctcgctctgtcgcccaggccagactgcggactgcagtggcgcaatctcggctcactgcaagctccgcttcccgggttcacgccattctcctgcctcagcctcccgagtagctgggactacaggcgcccgccaccgcgcccggctaattttttgtatttttagtagagacggggtttcaccttgttagccaggatggtctcgatctcctgacctcatgatccacccgcctcggcctcccaaagtgctgggattacaggcgtgagccaccgcgcccggctgaatctacttattttaaagaagaaaaaactaaggcccaagtgtattgaatgtcttgacagagctcatagagttagctgaaggtaaagtcagggtgttcatgacttgttccattatgctgtatttccttaaacatacaccacacatatacttccctccctaccccagacaagaaatggatcttatgctaaggtagagagagctctgagttcaaaccagcagaccattactaaacaacagttagtgtttgaatccaatgattctatatcatgtaaaaatgtagtaccagataagtagtgttgaatctaacaatgaatgaagctttaaaggttaagcaaagtattacattcctatataaaacttatatttttaatggaaactaaaactagaatcccttttctagcccaagatacattggtgccatcacattttgcatgtgtgagaataaaattcaccaattataatataatgctcattcatgtaattcatcaaaaatattaagatatttaaaataaccttgaaaaagattgactattccatatttttatgatttatagatttttttaaacttaatgtgactgtttggaatgtacaacttatatggttttaagttaatcagataaactgttgtgttgcttaaatgagaaaggccatctttcagattttaccattaaagtgaatttgatggagtttgagtttcaattaaaatttttatctagttgacatagttgaaatcaaattccaaaagccaaaaaaactacaagaggaaattatccacaaaaggtataaaacccatgattttttatttctctgtttatttctgttttatttttccagtcactattgttaatcactatttctaattaaccaattccttgcaaaagttatgtttaattttgtgataagttcaaatgagaagttgtttaaaagaatcagcccaagatacagctatttctttttcttgagagaatgtgcagttgcaggctattattttcggtttattgggaaggtattttaaaaataaaaaggaaagtacttccccgccatagagttggcattaaatatggcagtaaattttttaaagtttttggttcgttcatatgtttgtggttttgcaggccctgagtatgcagatgttgtgtttttggtggacagctctgatcgcctgggatccaagtccttcccatttgtgaaaatgttcatcaccaaaatgatcagcagtctccccatagaggccgacaaataccgtgtggccctggcccagtacagtgataaacttcacagtgaattccacctgagcaccttcaaaggcaggagccccatgctgaaccacctaaggaagaactttggattcattggcgggtccctgcagataggaaaggctcttcaggaggctcacaggacttatttctctgcacccgcaaatgggagagacaagaaacagtttcccccaattctagtggtcctggcttcatctgagtctgaggataatgtggaagaggcatcaaaggccctgcggaaagacggagtgaaaatcatctctgtaggggtgcagaaagcttctgaggaaaacctgaaggccatggccacgtctcagtttcatttcaaccttcggacagtcagagacctcagcatgttttcccaaaacatgacacacatcatcaaggatgtaataaagtacaaggagggagcagttgatgacatctttgtagaaggtgggcttaggatatgtgtataggaatgatgataaaacgcttttgaaaaattaaaatggggagaggattgaaattctatgaatattcctatccccaaaatgggctgcattttcagatgttatgtacccatcgtttaagagagtccagtgattatgaccattttcaattcagtgaagcccagaagtcttggtttttcatgtttcacttatctgtgttgcctgacattcacagacttcttaaaatttagggatgctttctccctgccacccagctgatctctgagctatttccctgggctttagttgctatgtagttttagtactggttcattgaaaaggtaagtttgcttctaaagaaattcttgactcttaaaaccacataatataatcatagaatgttagacctaaaggcaacttccagaagtccagatccccctgtttttttgcaaaaaagaacttatatatatccttagaagtgatgtgccttggcccaggggccaggctgtgacttaaagtcagagctaacaggccagatctcccaattcccagccatgtagtttcagctccagactgccttgcttcctgctgccctgttctgaattagttttccctgtgttctgatctgtggccaaacttctctcctggtctgtcctcttgtactactctagtaacaagaatggtcaagagttggtgatcatcattcaagtgaagggcaggggatagccagtaaaaaacaatgtgttcaaagtgtacatgtccaaatatgttatataggaaactcacattatccctgattaaatcagtttgaatgagctgatatatatacttacctattgataatagagaatgctttccttggggtcatctgtgaaactatgagtccttattactagcatcattcccaaataaaagaactgaaaatgcaattgctatttcgttactatcccttaggaatatttggactgtaactgctgactatagtgtggatgatgcttaaatgattttaatatgatagcaatggctatggttcactgaatgaattttatgtaccaggccccatgctaagaatattgtcgcattaaatccccataacaactctatgagattaatattgtctcccttttacagatgaggaaattgaagccgggagtttagctaagatgtagtatttgaactcaggtctctttaacctcaacttcataattatttgtctacctccttctctaagtgcataactgagctctgctgtatggtcttcatgccttctaatgctcaccaaagatgctgaaccaccagctaaaattgtgcttgtttatttcttgccacacagcttgccaaggcccttctatggccgatgttgtgttcctattggatatgtcaatcaatggaagtgaggagaactttgactatcttaaaggattcttggaagaaagtgtatctgcccttgacataaaggaaaattgcatgagggttggccttgtggcctatagcaatgagacaaaagtgataaattcactgagcatgggcataaataagtcagaggttctccagcatatacagaacctttctccccgaactgggaaggcctatactggagctgccatcaaaaagctcaggaaggaagtttttagtgcacggaatggcagtcggaagaatcagggggtgccccagattgccgtgctggtgacccaccgagattcagaagacaacgtgacaaaagcagctgttaacctccgacgggagggtgtgaccatcttcaccctgggcatagagggcgccagcgacacccagttggaaaagatagcatcccaccctgctgagcagtatgtctccaaactgaagaccttcgctgacctggctgctcacaaccagacatttctgaagaagctgcggaaccaaataacacacacagtctctgtcttttcagagaggactgaaacgctcaaatctggtaaggtcttctgctgaaagaagggttgtttggattctttttttcttctctttcaaatattctgtatacaaagtggattggcttgggaagatgtggatgggaaggataagttcctaattcttttacttgagcttgaaaatatgaagcctaatttggggacaataaaagccattgaggtgttggcatggggagaagagatttccccttttagttcctcttttgtgcagctttaattggatttgttactcatccatgttccagaataccttcctttgctatttttctctcttcttttgtctttctctcttttgcctctcacgttcccctgctcttccctttatttctttattctttttgtacttttctcacccaaatcatctttcctcatttccaaattccaatttagagaataaacaggagtgtgatttgaatgaagaaaaagtaattatgtaatttgttgtggggtaccattctagcatccaccagtgcagggacagagacagagggtgatgtatcttatgtttcatatatacacttataaatatttttatgtattggtatacatatagatgtgtatattcttccataaatatttatagcatatttactacaaatgtcattgtctcactcatgaatagtagccttagttagatgactaggagcgggtaaggagtaaataatttgctcaagagagttcatgggcccacaatgtccagttaaatacctgtccagttaaacaccttctccatttcccaacacactacttgactttttgctaagcagttatttactaatgggtgaagtgtcttgtaaaaagcagcttcaaattttttaaatctcctaccatattcagacttatcctgattcatggcagagaattggggcaatagtcttaaagtgtcagaagcgattcatttggatgttaagattcccccattttaagctaacaaagcatgtattttaagcctagaagctgtttcccatttttctgtctgaagaggttcatatttgttcttctttccatgtgctctcatttcttcttcatgcttgctcaaatgccacatgcaacttattgattcctttttaggttgtgtggacactgaggaagcagacatctatctgcttatcgatggctcagggagcacccaggccacagatttccatgaaatgaagacgttcctgtcagaggtggtagggatgttcaacattgctccccataaggtgcgggttggggccgttcagtatgctgacagctgggacttggaatttgagatcaataaatactccaacaagcaggatttgggaaaggccattgagaatatcaggcagatgggtgggaatacaaacacaggcgcagcactgaatttcacactgagtctgttgcaaaaagcaaagaagcagcgaggaaacaaagttccatgccaccttgttgtcctgacaaatggcatgtccaaggatagcatcttggagcctgcaaacagactgagagaagagcacatccgagtttatgctatcgggatcaaggaggccaaccaaacacagctgagagaaattgcaggagaggaaaagagagtgtattacgtgcatgactttgatgcattgaaagacataagaaaccaagttgttcaagaaatctgtactgaagaaggtaagagaaatcgtggctttacctactgaccttcactcgcaaattgctatcctggcaataattgacattgctggtttagaaaaacaacataaattactaagttgagatttgttaacttgtgtaactgtgttctctagaacaaagctaagagcccattatactgttgttctaaataatatctgaagcataagaaaaatatttggaggaatttccctaataagtattaatcagcttcctctcacaatttcttgccaggatagatatatgagtgtacaccacacgtgtaatatgataaaatgatttcagattgtaaggagttcttcaggtttatatgaatgtctttttatacagcttttatgaaatcatttagagctcctgttttcaaccaggagtgattttgcacccttagaggttatttgtcaacgcctagagacatttctgatggtcataactggagggtgctcctgtcatctaagaggtagaggtcagggatactgcaaagcattttacagtatcctacaacacacagacttggcacagtaaaaatgatacccaagatgtcaatggtgctgaggttgagtaaccctgagttatgtatttaagcaagttactaaataacaaatagaatattctcacttttattgtcttctaagctttatttactactaattattactaagtacacatgtcaatataaaattatttgtgttttggattttcctgtttactctgaactttttacatgtagctgacttgaataaacatcacagtttttcctatgcagcttgcaaagagatgaaagctgacatcatgtttctggtggacagttctggaagtataggacctgaaaacttcagcaaaatgaaaacatttatgaaaaacctggtgagcaagtctcagattggaccagatcgggtgcaaattggtgtagtccagttcagcgacatcaataaggaagagtttcagctcaacagattcatgtcccaaagcgacatttcaaatgcaatagaccaaatggctcacattggacaaaccaccctgactggtagtgccctgagctttgtgtctcagtacttcagccccaccaagggcgcccggcccaacatcagaaagtttctcatcctcatcacggatggtgaagctcaggacatagtaaaggaaccagcagtagtgcttcggcaagaaggtgtaatcatctattctgtgggagtgtttggctccaatgtcacccagcttgaggagatcagtgggaggcccgagatggttttttatgttgagaattttgacattctgcagcgcattgaagatgatcttgtttttggaatatgcagcccccgtgaaggtaggcatgggcatactcactagcaggactatccgaacaacagatgtcttttttagcctctatttcttgaatttaattctatttacatattgtaaacttttggtttaattgaaatgtttctcctagtggctttgacctgttgaattaaacagacagtgaggaagagttttggtttacctagacccattcccatttgtaggtaaatagcactacagtgatggatctccatttaagaaaaatggtatcataccagttcttagatcaggttccctagaagcagaagttaagtcaggggctctttggaagtgatttattgaggaggtattttcagaaggggtgtaggaaacaggtcagggcatgggtaggaactgaacaaggaaatcaccttaggtggagtctagtttggcctgatcccatggggagctccagaccatgaattacagagttggtcctaccttgaggcgaggggctcagccctgtgtaccctgtgtcacgtgggctacatgtgggttgctgaggcagccctggcatttatcctcctgggcaaggtggctcctctttgacctacacatctactatatatggtgcttatttttgcaatttctaaagaccaatacttgtatcaaatgaggtgatgtttgcgaaaacactttgatagttattaaattttataaagcaggaatatagtaagaggacttgagcaacggttgcttcaaaggaagtaaggaacctagtccccactgtcttcccatgaaactgcagagtaatggaaatgatcaaaagtactgggaatgtagagtaatggaaatgatcaaataaaagctcagccaatataaggggctgatttatatgtgacccatagggcttgatgacagaggcattctgaaaatgaaggacatagatctgcatggagtttaaagggaagagaggaacattgtttgcttattcaaataacagttctgttcaactcccactggaaggtttggtgctcatgatctgtattttgtagaaaaagagtacacctggtttctatttcctggtaacttcgcccagaacaaatatgaactttctgaagcgttctgacactgagtaatgtattcccagtctcctgggtaatccaagcaggcttcccaggcagtcaaagaccacggggacatagttcttctacgtaaattcccaagtacagccagcctttcttgggaattttgttgatggccctgtacacatggcctgcagttagtggggataagtacaatggctctaaggttttcaacagcccttacatagcaagtggctggcgaaagaagaaaatgtggcaagcctctggggggtgggtgctttctcacaattccatttctcaagaatggatgagttaatgtttggatcatacctttctatggcctgtagagagaatgtgctacataaggactaaataacaaaccatcttacaattccccttctccagaatggatgagttagttttggaacactgcacctttggagggaacatgctccacatggattaagaattaattgggtctttcctgcttttctgttccatggtgctgacctcagatttaaaaagttaatagcatcatgctagaacagcttagttggacccagtgcgaagtgggcttatttctatgatgaaacccaaaactgaaaatagatgtttcaaaaaagtcaaaaagtgaggaaaaagtaactttgaaaagtcagccatcagagaatcatgaaaaatatacagtgttgccaaattcattttcatttggtcatttccccaaggtttatattaagaatacaaatctcaagatcgtggctaaaataaaaagaaaaaaattgtataaatgaaagcacatgttggataaaccacttatacaggaaaatttacacagaattgatttttttagtccaaagcttttaaaattttttattcctggcaatcctgtgattgtcacttgacctcgtcccactccctgcagtgggcccccactgactcccgccttatcttacaagctcacctaagtgagtattaactgtatacttccagcaccaatgtatgtgtattgtcctcttatccagggaaccgacattctaatgcacagcatgatccccttggagagaaaacactagcaatttataaaaaggttgaggcgtctcccatgctgtccaaagctaatctcatatggtttacctctctcttcctctttcagaatgcaagcggattgaagttttagacgttgtgtttgtcattgatagctctggcagtattgactatgatgagtataatatcatgaaggattttatgattggcttagtgaaaaaagctgatgtgggcaagaatcaggtccggtttggggctctgaagtatgctgatgacccagaggtgctgttttatctggatgactttggcacaaaactggaggtaatttcagtgctccagaatgaccaagccatgggtggcagtacttatactgctgaggcactgggcttctcagaccacatgttcactgaagcccggggcagccgcctgaacaagggggtcccccaagtcctcattgtgatcaccgatggggaatcccatgatgctgataaactcaatgccacggcaaaggccttgcgggacaaaggcattcttgtcctggctgtggggattgatggtgccaatcccgtggagctgttagccatggcaggatcaagcgacaagtacttcttcgtggagacttttggaggtctgaagggaatattttcagatgtgacagccagtgtctgcaactcttcaaaagtaggtaagttttgccaactaagtttttcctaattattagcagagggacaaatgagagagaaagcaaagcaatggctctcaggaacaagttttccagagaggagagaaggagctctaattgtttcataggactttctatattataaaatctgagggttggaaagaccttgggcatatttcattcagacttctccccaaagagagatactttctgcagcattcctaatcacttcttcctaaactcttctaatgatgggaaattcaaaagttgttttgttttgttttgttttggctttttttttaaagacagggtcttgctctgttgcccaggctggagtgcagtagcatgatcacggctcactgcagcctcaacttccaggactcaggtgatcatcctgcctctgcctccccaaggagctgggactacagatgtgtggcatgaggcatggctaatttttttttttttttttttttgtgaagacagggtttcactatgttgcccaggctggtctcaaactcctggattcaagccatctgccccccttggcctcccaaagtgctgggattacaagtgtgggccactacactgagctgaattcaccagttttgaacagccttcattagaacacatatgtgcttacacatttttccacccactagttctttttcctctttatgcaagaaacaaattctcctcctaagaaccagctagaattgcctgaagtcttctttccttcaggctagaagtcaccagcttctttgcttatttcaattgtggcagaaggtcatttaaaatgtgaagcccagtattaaaaactctgttccagcctcagaagtttccaggacagagcatagtggggcttctattctggcagctggagattgcattgctgcatgtatgtatgtattccttccttcatcattttactatcattttatacttttggttcagagaaagattgttctctacttagtttcctgagtaattttcccaagatgtattttactaaagatactaaatgtttttactagatgaattgctattaattcatgattccaacatctagatatagtagttctttttaaaactcatctaacttctctggttttcctaagccttgcctccttagaatgcagctactatctttttctttcacaaaactaataaaatctttctgggtcttactgaaaactgggacaaatctcttccttccttgtagccattgtctaaaattggatctatccttctccagttcactgtagaagttgacattgcattttcatattgaaaattctccttgggacagaaaaacagtactagatttcctttattgaaatctgaaacaatttaataagttaaccaattcctaaaggatcgatttaccatatttcttcttatcacttccttgcttacctggacttcaggaatctcagacacctttaatatttctgaggctatgatgagaactaagttcggagagtggtgagatcactggggaattcatggaaacgatcatgcttaccagaaagctaaggaacacacatgtgccaagcataactcattcattggcagtggtctctcatgttcttcttgttttatatttgctgtgttaatatgggggaagcatctttatattgcattgcttgttcacaaatatttttctcaaatagatatttttgcctacatacagcagaaaggggctgataaaaaggaaaactgactagatacagaccaaaaggcatccttttaaaacctcttctcaatatgccctaatgaactagaaaaatatttattggctcaaatgaccagggaggctaagtcaataacatgaactatctgcctctttgtttgaatccctaaatgtatgtgtgttttgttttctcttggtgtgctactattgtcaccgggctttctggaagagctgaggctaggttgtagatgagaacaagttttccatagcgctggccccagttctctggcatctcagaaaataaaatggcctaataccaaatcaacaagccaagagaagcataaaaagatgtgtgagtgattcattccttgtactgactttaagagctgatcatttgcctttatttcctctacaattattgtgaccacatgctagcataagataagaaaccactttcagaaatatttctatatagctgcaaactttttttttttttttttttttgagacggggtcttgctctgtcacccaggctggagtgcagaggcacaatctcggctcactacaagctccgcctcccgggttcacgccattctcctgactcaggctcccgagtagctgggaccacaggcagccactaccacacccaactaatttttttaattttttttagttgatcctgggtttcaccatgttagccaggatggtctcgctctcctgaccttgtgatctgcccgcctcggcctcccaaagtgctgggattacaggagtgagccaccgcgcccggcctatagctgcaaacattgaatttactcttggtggattaaggaaagaataacaatctgggttttctgttgttccttctcttctttgtagattgtgaaattgacaaagtagatcttgttttccttatggatggttcaactagcattcagccaaatgacttcaagaaaatgaaggaatttctggcatctgttgttcaagactttgatgtcagcctcaacagagtgcgaataggagcggcccagtttagcgatacctatcacccggagtttccactgggaactttcataggtgaaaaagagatatcatttcagattgaaaacatcaagcagatctttggaaacacacacatcggtgctgcactcagggaggtggaacattacttcaggccagacatgggcagcaggataaatacaggtaccccacaggtgctgctggtccttacagatggccagtcccaagacgaggtggcccaggccgcggaagccctgagacacagaggtatcgacatctactccgtgggcattggggatgtggatgaccagcagctcattcagatcaccgggactgcagagaaaaaactgacagtgcacaacttcgatgaactgaagaaggtcaataaaaggatcgttcgcaacatctgtaccacagcgggtgaaagcagtaagtatttagcaagttcttcattcgattccctacaccatcttctctggcattttcttccagctccattgtcatcccctggggctagtgggagaatttagatttgtgcctctggatttcaaattgagcttttcacagttattaaatatttgtcttgacctgtggattgagaaacagggtgtttgatatcctgtgcccttttttctccctgtctcctgggggagcatgcctcctttgtgagtgggaatgcctgccttcaggtgtgaggaaaaggccattgtttgcaatctggctggtttcagaggttgaagagcaatgcctcaaagaaaggaaatatttgactgatttttggttgcttggcaatacggcctatagggctgccaagagctgtggtacaggtaggtaagaaacctccctagaggtttatatctttattatgaaattttactgcagaaattagtaaatatcttctttacaattagtgcattttgacacttttttcaacagatggaagtaaagtgtcttaaaggagaagtcactttttctgttataaaggtatcttatgggttggttatgattctatataactaccaaaggtaaacattaatcccagatttccactcaaaaaaaaaagttgcaaggtcattaagaggcagctctgaagacagacagcctgacagcagatccctgctctatggccatttttttccgggacaagttgcctaacttctctaagtttaattttttcacctttgaaatgtgaataatagcagtacctagttcaaaagaacattgtgaggattaaatgagaaaatgcatatttcaactttaatgagcataacacctgagatataattataaagtgccttcatttttatctaccagtgaccattaaatttatgaatgggagctagctcttcctttgcccctcatcactttcaggaaataaaagaaccttcttttggtgattaatatgtccatcccagtgtaatgttaaaactttacattttattcaaggttaccccacatttccagcttgctacaggctgccttgctgtgagagaagtggttgacatttctcccaatgtccccagactttcactgcactccccatcttccaggtgctcctccatcttactaaccatagtttctggtctctccagaaggagaaggtactaggaaagggggaacaactaaaagggtacaggaaagtttttaatctgatggcccttatcaggaattggttttctctgaaaatagcccgtgtctaaagctgggtccattcataggtccttcgaagattccacctcctgccccacatcatcacctccccaaccaagccacctttgtctaaagatctctccatcacagtttttttttttaggaggctaagtatgtctctattccagagtgtcccttatgcctttctcagcctctgggcatctgctgatgcctccagctttgttctgctgaggtttctctgtcccctccaggggcttcttagatgggagatcagaggagcccacaacagcttgctcttctactcagccatatcagctccatggtcaacaataacatatcgattgccctaataaaaactgggaatcacagccctccagcgtgattgcctcttctttgtagggagggcaatattccatcctgtgtctcatgctttagaatttccaggattaggttatctccagattatctctgaaagcccctctctcagcttgaaaaggaagtcacccactctccttgcgtatatgtgtgtgtgcctgatgggagagcccacagcacatcaacagctctctccaaacacttttccaaactgcagtcttaaacctttaataagacctgatgtgcaggttaaaggttaagagttctgtagttgatttgggactactgactctctaagttctgcttcacatactttggaatgtatctgattacctcggccaaaccttccacattaatttcttgtttcatgtgaaatactcaagcccaattattaggcagaaaattctctctgaaccatccagtttctatctgagtgtgatgaaagaaaaccatgtggaaagtaaaaaacagaagtatgaactccaagtaagtaatgagttattttttaaatagtcatgaatgcaaaaaaaaataagaaaaatactctatattaagataaacttgaggttattacttcagcaaggaagaatgtgaggcaggctatgagctgaggactgatgaagctggaatgaacactgataaagcttcaaaggcatgtacaaatatattaggggatgccagttctttttaaactataaatcccaaaacaaggaaatcagacagtagctgggtatggttcaaaacaaactggacttaaggcctgaacacttgctgtgcttcttattaaaatatgcataactttggagatgtcagtaccatttctgagtcttagttttctggtttgtaaatctaaataatctctaaaagttcctctaattgtatactgtgattcaacatatgtgaaagggaggtcagacgcatggaggtatgatggaggtgactaagaatcattattttttgagcatctacgaagggtcaagcctggtgttctaagcactttaaatgtactatctcactcaattctcccaacatcttacatggttggtgtttttgttttcatttataaatgtggaaactggggttcaagggaatattggtagcctggtctagatcatacaggaagtaagactaagcacattttgaaacctagggttgtctgacccccgtctgttcctctcaccacccccatccctgacttttttgttaaattaagctgttttcttgatatagttattgtctaggttatctgatattgacattataaagaactaatatctaagtgttgtgcttcaccaattaatagctggagcttattaagacatcatagggttgtatctttgaaattgtttccacaagctgatattccctaaggaaaccacttcctgctgtcacttccaataacataacctagtagtagaactagcaacctgcatgacttgtcatcactggctaaccaggaagtggtagaataaggtggttcagcatgtggactccagagaagtctggatctgaatcccaagtgtgagagacacagtgttaactgtgagatcttgggcaagcttctctgtcacagcttcttcatctgcaaaatgaaaaagagcttctacttattctgtgtcttatgaggagaagtgagacagtgaattggaagtatatggtaagtgttcattgagagttagctaatatcatagcacgttgctgagagtaccatgaagggatgtcttgaatgaaaatttgtggagtaatggggttaattcacaggaggacaatttaccaacaattccttagtttagggacttaaatattttagccacatttcagagctatattcaaatttaataaatatacgtggtattttcttaagcaactgttttctcacctttatccatgcttattttcttggtttttctttgagactggctattctgtccactagaggagactttgagcaatttttaggatgtggaggttctgcctgtttttttagcatggagccatgattaggtagcagagaatcaggagcatctctcatctgatgtatctatcattatggatagatgaatcaagagggagactgagcaaaagattagtctcattagggtaagagacaacctcaggatttgattcaagagatgtgaaaaatataaggaaaaaaatagatgttcatgtccaacttttcttaataaggagctctttttatattcctgccttaactgggtctgggttctccagaaaacagagcctgaagcagagtttacatgccaatactttattgggagtgcagtcccagggaagcaagagtgaatggaagggaagtgatgcgggaaaggaggggaaagtaaatacaaggtagtatgttaccaagttagccacagcttaagaaagcataactggtgcgttggtcatgcagaacatcactagagaagccctataaaaccaccgtgtataccagcccagcagagggaataaaagagaggatttacctgccaattgcttcccatctactgcctctcataagtcagagagttaacttccctacactactgggttgcgttatccagccccttatggaaactgctggggaaatcagaaacaggtcccacagtgcactacacctagggcaggaaatgctgaagggaccagggcctccctaagttcacgtgggttgcacacgggcaccagagccaaggtggccgttctgcagtgagcatggtggaggctgtgtcaaagccaggctgtcacttccacggttagcagactaaggatgatggcagctagggctcttccgtggacaaatgtctacgccttgggaaagggaggaagcaaatctgggaggtatataaactgagtctctaacagtccctagctatactttatagatgatcctttcttttttaatctaaaataccccatctttcaaagtcccaaacagatttctctcctatcccagctaataactgccactttcccctttaaagtattttctcaagaatctgtcttctaatcttacaaatgtaccctagcctcttgacagtatttcttaataccaagaatctgccatcatcagctccaattaagtactgtctttataaattaataattagaatcagcttttgggcttggcaggaaacaatgagactataactgtctgatccaattcactcttttctgtgcttttgtatttttacttggaaatatataacccccttatttttatagacaagaaaattaatgcccagagaggataagagttgccaaaagtagtttggcagtaacagaatggtgaccagcatgtgactgaaactgaacttctgtcttcccactcacagacttgccccccaggattccacattgctatttggaggactagtcaagggctcagcgggctactcttacttctcttatcaccctctgtagccagtcctgccaattaccttcttaaatattttgcttttattagccctttcttattcccactgctgttatcctactttaattcttcattatttctttggaaatccaatttcagctttctccctagctcacttccaaaactccctgcctccagtcctttcaagtcaccaatggcagattcactttaaagtacaacctgtgtcatggaagacttcaagacagggctcctgatttaagggcagatgtctcagtggagtttttaggctgttgcatgagagcctcttgctcagtatggtttggtctctctcactgtacttagacacatggttactaattctggacttgtccaccaaattccattccttctatcacattattatggaatcatttgtcaattcaaattaaacacaaggaacttgtttacctaaataagtttgtacgttcagcaatctagacaaaaatttaaaatacacaatgtttataggcaacagttcccaaggtcacttgatgtcattttggtatttctgctggttggtttttttcacacaattctgttttccttaaagacattatcatatcttggttactacctggttttctgctcaggtttaaacagtcatcatcaaaaatgaaactttcaagctcaagacagatatgagaagacgtagatgcaagaggaattttggaaaggatatattctgcttttttctaaatagtttatcttattttctgatgaagaagagatttccaataaaatacagtaaaataagatgctcagtcttccagatttttgataacactttgatttaccttgaatctcatgatgaaaattgattatcaaataaaatttttgttttccctcagtcaattctcattaaaaatcaagttgccaacacttgttttaaaagttgaaattgatgattttggttttaagcatttgcaaatgtccaactgaccagtgtgtctgggaagtagttaagcatttgtctttacaaggaatatcttaaacattgctgatctaagcaaaccaaattaaaaacaaccactcattttatcaagcaagctgtatgtgttcagtttgctgaaaaaaattagagtttttagccaagttaaaaattcgtgaaaggagagtgtatgagtcacatgactttattgttctctaattaactgcctttaggacactcagcttaaaatatcaagccctttctagtttctccaactcttaagtttccctagaattaataagaataagagcaaagcactttaatgcaacatgcctctaagtatttaacctcaaaatggcagtgtccgtggcttctggaatggctgagctcctgaaagcagcaccatctttgacatggtcgaatgtgaataatttggttatcagtttcttcatttgtcagacttacaccaagcaagatctcaaaggatctcctgaattttttagtttttttttttttcttttctgcatggatgttagaagacaacaagaggaatcaaaaaggccctttttagaaatataaatcatcaaaaccattccttagatgagtcctttgtgatttatttttttctagatgactttattcaaatgttcttaaatttcccttatgattattgtaatttaatatttgttgaatgacctcaattgataagtagcattatatgaatgtcttattttagactaatgacatttccacagtgtactttagggatatttaaatgattctgcatgactttttcaatagctaaaataaaatctttcagaacttcattatagaatcatcagattttatatgacctgaaaaaataataatgaacccttacacttttacaggttagaaaagagttgattcttagcctctttctttattcatttatgcctttctttgtgttccaactttataactgaaatagaattccaagtcccttgattcagacatggtgtctgagttaaataaaggcgtttgttgatttattaagacatgcttttcctttgaatcctagactgtttcgtggatgttgtggtgggatttgatgtctcaactcaggagaaagggcagactttgcttgaaggtcagccttggatggaaacctaccttcaagacatcttacgtgccatcagctccctcaatggagtaagctgtgaggtgggcacagagactcaggtcagtgtggcttttcaagtgaccaatgccatggaaaaatattctcccaagtttgagatctacagtgaaaacatactgaatagcttgaaggatataacagttaaaggaccatctcttctcaatgcaaacctcttggattctctatgggatacatttcagaataaatcagctgctcgaggaaaggtaacatggatttatcttatttgttggtctatgattgcaatgaaccctttttaattcattttactttttttgaatactttcttaggtggtccttttattttcagatggattggatgatgatgttgagaaacttgaacaaaaatctgatgaacttagaaaagaaggtactgagtatggagaagtgggaagggagtgcttattaactttataatctcagaactaaattctggctcttaaatttccaggctcttaaattttgaataaccctgattttgacaatctccgtattctgtatgtactaggcagaacaaatgagctctcagaatattttgacatccacttttttcctcatgcctcatgtgtatgaaacagcactgaatacaaagtcctatcctttgtttcatattactgtatttcttcttcctgacctttcctggagaatgttcctttctctctcgccccacattgtctaatattgctacttctttagtgtcaccagaagagaagagtatatttctccttgaccagggaatgagagtcagttttcttctaacactcttaaagttcccagagttgcaagcatttttggataaatttactcatgttttgcagctttctaatcagttccttccttcagaccatggattggccaaccatggtgtttgagatttttaagctctggcaccaggcttttggcttttgaaccaaaagctattctgagtcaaacaagaacatgtggatgttcttgtttagtcaaacaaagaagttcttgtttgactcagaatagaagtcctcttctgtaagtgggtgctatttctgccctacccagatctcctttactggcagattcacctatcctctagctgctaacaactcacagcttactccttctctgaagaattgcccttggacagtagagctgcctcacctggaaggttgctgtccaccccatccttgggcagcagataagattacagagttggacctttgcctctaaatgacaccagtggtgtgctgcaatttatgctccagagcttcctgggatcaggctaaataaagctagactccagctgcaacactgtcttcttgctcagcaacttcccctgccctatcctgttttcctcactccctttcttctgaaagtgcttcctcaacaatttgtgtacctccaaatccttatctcaaactctgtttctagggaacatgacctaagacattatctctcaggttagctaataggggttgacaggactttgtcttttctattttgttctctctctccagtcttcaacaaattgcaaaattatctgagtttactactagggagtaaagtttttattttatcccttatttacgaagtatgccttgtttttattctctctggtcttggcctttgttcatgagctgtaatgaaggttttaattaagactgaaaaaagatactagagtgcttagttgggatgggtagggttgttttggtggttgctgttattttgttttcttttatttcagcttttcctttgtggggaaaaggtatttctcttgcaaaggacagtagagtttcttccaggaagtgctttggaatatccagaattctaagaccaagtatctttcttccaatgcctactgaaaaactagtaaatgggtatcaacttcagaagctatattttgaataatatcctcagatatttagattcttccaatggaagagagaaatcatggcaataatgttctttgaaaagtgtctagttctttgaaagtgaccatctttgacatggttgagtgtgaataatttggttaccagtttcttcacctgtcagacttacaccaagcaagatctcaaaggatctcctgagttttttggttttgtttttttctttaataaagtaaagaaagtggttttctgtatggacaagaagtatctctctcgctggcttcccatacttacacaggacttcacttggtgctgggccctatgatctattcacctaggaaagcttccttaatttcaggccgggcatcaatatgtgtaaagtatgcaatcatcactgaacaagaggagacaaggaaaaaacaatccttgatggcggacgtggctgtaaaacttatgcacatggaatggggcttaaattaattaattttttagaattgaataccctagaatctactcagtgattctttattctcccaagtttgaaaatcttttctttcttaattcactgttagaaaattgaaaacattgtatttaggatcatgtgactcatttattggatgagtctgaaagaagataggagtcccctgatcccaagaaaaacagttataaataatagttatatgcatatttcttgcaagtcaacaatcccctggttcttatgactcttaaaattttacatttcctgggtattataagaaaaatcagatgacagaaggtttcatttctcttataagtagatccattagcatgccttctcttgataactaaacaccaattgatgtacaagcatttcatatcccagcccactctacaacctcttttctccccctcctcattctcattctagaagaatgaccgactatcctgttttgttgggaacaagatgggaactttcaacactagaaccaggaaagtcccaggaaatgaggacaaattgtcaccctatttttctttggtggttcgtttgttctttctttttttattttttttattttttaaattaatttatttttttgagatggagtcttgccctgttgcccaggttggagtgcagtggtgccatctcggctcactgcaagctccgcctcccaggttcaagtgattctcgtgtgtcagcctcccgagtagctgggactacaggcgcctgccaccacacccggctaattttttgtattttcagtagagatggggtttcactgtgttagccaggatggtctctatctcctgcccttgtgatccgcctgcctcggcctcccagagtgatgggattacaggtgtgagccaccgcacccggcctctttctttcttccactgcagctaaccattctgtttgcctctcttggaacttgaacctctccaatatgtccctgaaacttcattctcttgatttctctcttcatctactcatttcatataaaatcatatcatataaatttatttaagaaggtgttcttgactctcagccaagtccttgaacatttatctattctggttcattggtacccaattctcatcaaaggattctttacccatcaataataaaatgagaaaaatgttgccagtggagtaaggtttacatgaagctaaacgtatttgattttaagactgccctttattccaagattatatctttagcacatttttattgtcagaatatcctttgaatgtaggctatggaattaggctatctgggtaaaaaacctaaaaataccacttacaggcagtcatttaacctctccaagtctgtttgcttgtctgtaaaataggactataattatacataccaatagagttatattcgaaccttacaaataagataatgcatgtaaagcacttaaccatttcccaggcacacagtttctatcaacaaatgatagcactgttgttgctgaattacttcctccaccataatgactgtcagatttattaccatcattatttaatgttcttacctagcaaaataagtcattggcaaccctatgttggtccttaaccaacagttttctttgaaataattgtattcataaaaccccaaagcctccgagccacagctcctggatgattgtgtgtcatctgttcctaattgcctgacaataggcctgttactcttttactacttataggtgcaactgggttattgatgtcttatcagatcgtacagagctgtgcttttcagattttaatgtgtatacaaatcacctggggattttgttaaaatacaaattctgattcagtaagtgtgggatggggcctgagattctgtatttctgataagcccccaggtgatgccagtgctgctgcttcaaggatcctccactgagtggcaaaaatgtagaacatgtattttctgtttttgagacagggttttgctctgttgcccaggctggggtgcaggggcacaatcacaggtcactgcaggctcaacctcccaggcttaagcgatcctcccacttcagcctcccatgtagctgggaccacaggcatatgccaccatgcccagctaattttgtaaaattttgtaaattttttgtagaggtggaatcttgccatgttgcccaagctggattttcttagtgtgtgaatttctctttactttagcatgctctgtagatcttttagaactgtctccttcaaatcaaggaactggaagttgtgttacaattttccctgtctccaatttatttagttttgaaaaacataattccttttgtactcttattatagtcttgtcacttgtcaggtttacatcatgtgtttgggggaagtggacagtaaactgactgttcttcttgcagctgttcactgagaataacaatttaaatatgcttgcaaaaaactaaagtaaccaaacccacctcacctggaacattgtaaactgtgttggataggcctgaatgccctcataactgttgctctggatggacctgctgattcaagtgacttggctgatcttccctatattgaatttgggaaaggatttgagtacaggacacagctctctattggcatgagagaacttggaagccggctgtcaaagcagctggtaagttattctgaaaaggctggtgagcttaaattttcaattattttgtatataagtttaatacttatgcttaagaatttgaacttactgtgtttatttgggagtgaagaaaggtttttatgaattagtgaacagcctaagtaagagggtttgtttggaagaaatgtaatacagtaaagagatgtcaaagcatgtttaatttatacactgggcaaaaataggaggaggaaagagggaaaaagaagaaaatttaaatagcacccacaatcatgtccaaattatagccaaagaacataagtgacaaaaagaatctgagatgcgagcgtgaatcggccgttaacctccaccagccagttttcacaccgcttgcagatcctaggcataacagctttccgtactgagtgtaattctagtgtttaagatgtgtatttttcctgggataaggcctgtaaatgaaagcaaattacatttggagttcaactagagaaagagcaatctgctctaaagctggaggaaatgcctagtgacagtaaacctcacatgttgtactttatgagcaattgaaagattaggggttgtgactccttgagatttctaccttatattctctttgtttgtttgagacagtcttgctctatcgcccaggctgaagtgcagtgttgtgatctcagcttattgcaatctctgcctcccgggttcaagcaattctccctgcctcagcctcccgagtagctgggattaccggcgcccgccaccatgcccggctaatttttgtatatttagtagaaacagggttttgccatgttggccaggctggtcttgaactcctgacgtcatcttatgttctatttttaaacctaatgcctgtataagatgtatctcaattgtatttctttcaaaaacatacgagaattcaaactcaagtggtaaagtgtcagcaagctctgtgtggctctacttctactttaatgaattgctagtaattttgtaatttgcttataacttataaaatctttaatcagtatatgagaacactttccaaggaagtgctagctcctgctgttttccacctataaaattcatatacacataggtatttaagcagcttgttcagtgttgtaattatgtaaaaataattacatatagaatatgaaagttttgttggaattcctttctacatgggaagacagtgtttttacaaaatgtgtctttttttcctgtcgactactgtttgaaatctctttggtaattcatagaggaaggaaattcttcttcaaacaaacctctcagtttttgtatatcatataaatggaacactctacaagaaaaacttaatcatagatcagttttaatgttaatagtaatagatttgatgctgtagaattttggtgatccaaagaaaattgatgttatctgatataaaatcatagtatccattttgttattgtttgctttcacacatttccagtttggttgctttttctgaaattgtcaggaaaaagaatttcataatgtcagaaaaggaacattatatagtaggaaacaatcaaagggagaaaattgctaaatgactataacaaaagattttcatttttcattgcactagaaatttattgggaaacttcacaatacaaagattggttctgccccactaaagtgaagtataacatttatctgaaaatagaatttttctaaaagtaaatctggtgagttaattgtaaaaatgtaaagcaatatgtcatctattcaagggatggctgggtaagtccaggatgacatttattaatgttttaaaatatatgatatagatgtttttaccagagtataaagagtaatattctcctgtgccccaatcccctacagcaagtgcttccaaaatattgcacgtgtaagttgtgtttttgaaatcctatcagaattgctttggaagagttaaccattggacttagttccaagacatgttacattgggcactgtctaaattctctagcataccaagatttcacaaaatgaggaaaatagcatgcattcattttattgaacaaaatatttggggcagaaatatatagggaaatcgacaatatcatagtcagtgctagagtgagatggggcagggacagacaaccacatcagttggcatgcagtcagtttgccatagctaaactgataccaatttgaaaacacagaaacatttttgagttgatttggaatacctgaaatggtggagagtgcagatgatagaagaaaagatggaagcaaaaaaaaaaaaaaaaaaaaaagtttcatgcattctttctaaagcacagtcatttgaatggtgaccaggcttctgaaactgtggtagaagtctggatcgcatggttgaacttgtatatgagatttgggaagcaataccaccaaatgtaatgtatttcttaccctctcccaaggtcaatgttgctgaaaggacatgctgctgtttgttctgcaagtgcattggaggagatggcacaatgggagatcctggaccaccagggaaaagggtgattttagctcagatttatgggttactttgagttgtagtatgtccttcagacatgggtttaagtagaaataaggggtgatttttaacttctaaatagagcctcttatataagagtttattatactcctctttttatatgttaagttagtcatggattttccttggcattctaaattggagtcttttttaaaagtttttgtggaagactcaggagaaacaactgtcaagatccttgattatccagtattctagtactgatgacaatgatgcagaaaaatcagctataattcctcatgttggataatgaaagcctcctccatgtgaataacgcatttcagcattcatttttaatgatggcagagttattaaaatcaaagcgaagatactttgtgtactctgctgaaaaccaggctagatcagatcactctcttatagcaaaagatgttaagatgtctcattcatcttaagccaggtcaaaatgttatcacagatatataaacaaaaacaggctcattatttaaaaacagaaaccaacaacattgattcatatatttcctaaccagaaaaagtatatgtacccttatgtgaaaatattattttgaactttaagaaatgtttaaatacatataaacactgtggatatgttataatgatttcaatacagtttgtttacatgtgttttatttttgaataatttatagatagcactgtaactcccaaatcaccagggctatgtctctgaatatgtctctgaaagtttttggactaattatttcctgaatgtttcagcttcatgtaaagagagtggtagatttttttaaaaaacaaggctcagaaagaatggaaagaaaggtgtgtggtctatttttctatgtgtagcataaatcttaaaagattttttaataaacggagaataattctagtttatcagtggcaaatatagctgtgttgacttgaatgtttagaaagaagctctggaactatatataaacccagatttacaatattatgattgacacccccttgagttcactggacacttgtctcgaaattccatttctttttttttcatatatatatatatatatatatatatatatatatatatatatatattttttttttttttttttttttttttttttactataagttctagggtacttgtgcacaacgtgcaggtcttttacatatgtatacatgtgccatgttggtgtgctgcacccattaactcgtcatttacattaggtatatctcctaatgctatccctctccctccccccaccccacgacaggcccctgtgtgtgatgttccccttcctgtgtcccagtgttctcattgttcaattcccacctatgagtgagaacatgcggtgtttggtttttttgtcccttttttttgagacggagtctcgctctgccgcccaggctggagtgcagtggtgcgatctcggctcactgcaagctccgcctcccgggttcacgccagtctcctgcctcggcctcctgagtagctgggaccacaggcacccgccaccacacccggctaattttttatatttttagtagagacggggtttcaccgtgttagccaggatggtctcgatctcctggcctcttgatccgcccgcctgggcctcccaaagtgctggaattacaggcatgagccaccacacccggccaaaattccatttctttttatgtgtgtaaatgcaacctacattgggaaggaaggaccatttttttcaaacacttactattccacatgaagtaaaactgtaaaactgaatttggtttggttacctctgatttttggtccatagatgcaaatgttttcttccttttcttatttccagggacctccaggttttaaaggcagtgaaggctacctgggagaggagggaatcgctgtaagtcagggctcttttttacctccatttatccctaaaaacatctacaatatgaatttccttgagtcaattcagggggaagcaagaaaggtgagattctaaggattcgtgtacagaatctcagatcttcttttgtcctcattgtgctttgcttctggtggtcattagtggtttattgacctattgtctcttctttgactacccaccaacattgcacaatgaattcaatgcggaagtaacctccttcactaggggagttgaatcactgctgtttcccccattctggagcattctgtaaaggtaaaccaactcaccacattgtgtatcaaggaccccactctttcttgcattcattcatccttccttcctcccatcaatccatccaaacatttgtttaccaattatatataaacatcttaccatttcctacattattttatcaaagacctcacactttaacatactcattcattggttcattcaacaaatatatgttacatatatgtgtgcctggcagattatcagatacttaacaaatatttgtaggcttcagcaataagaaaaataaaaggaaaaatatggtttctacctccaggaaactttcaaactagtagaaatgcaaatgagacaacagtgattctggttgttttacacaagggctagactagaagtatagagacatgcaaaggagtgtggcagaacaactcagttacctaacagccttagctaaagttggggcttgagaggggaacgctgcgaacaaggagtagtacttgggcagacatttgaaggatgaataggaatttctacaggcaaagtttgggggaaaagtatgttcaagggcatgtatctgagtcagagaagatcatgttcataagatggcacatggttaacatggatggaacccaggtcactgcaggaggaagatatatgtggcaagtaagactcaggttattgggagtcttgaatcccctgctgaagatttggattgtgtcttctagttggtgggcagtcactgaatggtgggaagcacaggggtcaaaattatgggagtgtttagaaagcatgctcaagcaacattacagatgatgataaggtgaaggtttataggtaagtcttgcagtcatagatgcaagacaggtcctaatttgtgcttaggacagtatgactagatatgttaagaaggttggaaggacgtaacttggtgaccacttggtgagagagaagtctcacacaggcagtatgcaagtgggatccaaagcaaagggctgtctatcatcagggtatctctgatttatttctactcttagtttttataagcaagaactctggattgtgaaccatgagcattcacactttttttggtaacaaaaaacttgtcaagttttcaagacagatctcagattacaatagaaaaagctcatttggatatgtgccctttctcagggagaaagaggagcccctggaccagtgggagagcaaggtactaagggatgctatggcaccaaaggtcctaaggtaaggattgcataagagtgtggagttttctcaatattaattacattttcctacactaactataactgtccttttattttcagggaaacagaggactaaatggacaggaggtatgttaccaggcacatccatttacctacccatatgttatctagaaatatttttatttttgagattatttatcagtaaattatacaaataaagttgtcattgactttccttttttattgccagccatttcattttgtttcttcttctctttcattataggcaatacatattatttgttgatagtttctattactgagtaacctttaatattaataacccaggcccagcctcacaaggaggctgtatgtgaaacacaaaaatagagtttttgtttggcatctgacttctttacacatgcacgtgatgtactctgttctaatcatatctatcttttcagggagaagttggggaaaatggaattgacggattaaacggagaacaggtagagccttcttgtaccatagagacccttctgagctatttaccattatgaaaacgagaattctattaatagctttcccttcttgttttttagggtgataatggtcttcctggaagaaaaggagaaaagggagatgagggatctcaggtagggatttgaaaaggaagaacataaaaattgtactggggattaagggtgtgattaacagagtagaatactcagtcagctattgctacaaaactgttttgtgacagtcataaaacctcaatcacatacaacgatgaacatttatttcttatgtttctgaggggttcagccgattgaggctggacatggctcatgtctgtaaggtggccgggggctttactccatctgtcacttaccctcctgggaccaggagctagcctaaccatgctagccatgacctttttatgcccatggcagaagcacaagaaagcaagtggaaacatactagaactctcaggtcttcttcagacctagggtcagaactctctcaacacttgcatctctttctgttggccaaatcaatgcatattgccaaactcagaggaagggaatcttgcccaccacagttggaagtcattgtagagttacatggcaaaggacacaggaatagggagaggtgaagaactggggccatcaatgacaagcaactaccatagtaagaatagaagtggggtgttgacaagggtcagtggtgccaggcagcacattgaagagtgaatgtccctcatgcccacctagaataaataccaacagcagccatattttcatcctctactttgtctttagagtgtgaacaattgagtcagaaacaaccatcttgggcaaagtgcatattctttctgaatctcagttgccttataaaagaaagataataaggaatacctggttcatagaatatttgtaaaaaacaagatgacaagtgtgtctggaacacagagttcaccactgtggcaaataattgagttcactattaaattatttatatggtgcttgaaactaattttttcggttgttcatctttccagcttaaaaatagcctttgtagaaaaatatttaattattcacaccagggagaagaaaagctctgtttttattaattttattaaaacttcttgtcttgtttttcttctgatttgtattaactttagggaagcccagggaagagagggactcctggtgaccgtggagcaaagggcctgcgaggggatcccgtaagtgcacgggctgcaaactggagttagggcttgattcccatccgtacttctgatagggagtctcgatttcaaggtactacaatagtaaccctgagtttaaaacaccacaggcatgattgtaacattttaaattcaggtacctgtgctagatcctcttcatatactgaatgagtatgagcagtaaaaagcccttacatgtcttttgcaaatgcaattttgtaaatacatactcagaattgtttttgtgcttcaaaacaatgaagaaattctggtccacttcattatcttccaagcacctcaaaatacaaacacaatgacagaaagaaagccatgtcttttttttctgttcttgtgttagtctgttctcacattgctaataaagacatacctgagtctgggtaatttatagaggaaagaggtttaactgactcatagttccacatggctgaggtgccctcacaatcatgaagaaagagcaaaaggacgtcttatatggcagcaggcaagagagcttgtgcaggggaacttccatttataaaaccatcagatcccatgagacttactcactaccacaagaacagtatgggggaaaccacccccatgattcaattatttccacctggccccactgttgatatgtgggattattacaattcaagatgagatatgggaggagacacagccaaaccactatcagttctccaagaatttttctcaagaatatcagtctcatttcctgtaacccaggccaagtagaattatattaggcaaaacttatgacataaaggcactgcccttgcaggagcacaacccagctgagtaggcaggacccatgttaaagaaaaaaaaaaagataccaatatatagggaatatgccaagtccgatagaacatcagtactataggattttcatcaccatacccacacttaagtaagtctccaaaaccttaatgaattaagatttagctttgttttaaaatgtttattgaactgtaacatacatcagaaaagtccctgagttataaatacacagcttaatgaatgtgaatacacctgtgtagtcaccaccaggtaaagaaatagaacattaccagcatctcagaagccccctcatgcccactgcagccactactcaccttcccccaaggtaatcactatcctgtcactattaattagttttatgtgttctagaacttgatataaatggaaccatataagtgtctgctctttttttctggcttcttttgctttatacttgtaagatgaatcaatgttgtgtataacaatagttcattcaatttcgtggctgcattgcatagtatttcattgtgtgaatataccatgatttatttgttatactaatgataggtgggttgctcccagtttttgcttttataagtagtgctgctatgaatattcttatatatgtcttttgatgcacttttttacatatttatattgggtctatattttaagagtagaatttctggattataatgtgtatggccatactcagattgtctttacagtcaaatggttttcaaaagtttgtatttatttatactcccactagcaatgtatgagaacggtattacacactcatcagaatggttacaatttataaaaagcaataccaagtgctgataaggatgtgggacacctgggaatctcatgaggatttttgttttctttaatataacctcttgtatacaatgggttgatcagagaaggaatttgatgcaatatatatgaacatgtaaatgttaggcaactgtatttaaaaacagaggaatttgcgcatgaggaaaacattgttgactaagtgacatcttctgataatggtgtcctgagaattttcaacttcaaagaatctaatttagaaccaaagaactatccacatataagcacaacttagaaatattagttcaaatacaaagacgtttcagttatccatatatgatgaccaaaaattcatttggggcattgctatataacctccactgattttgatcagaatttctcctaaattgtctgctaaagatcgtgtgattgtgtaacatattttaaagagtctgaataatgtaaagagctttctattttaaaagaaatgctctatgacttccaactgtaaaacaactctgtttttttacatgtggcttcagtgcattactatttcaggaaaaattggggataaataaatagaacacacatgatcagtttattcttaggaaagcatgtaaatgatgctaatttttgaaaccctaagtttattcagataggatttatgatcacatggaagtgcatttggctgtttggaatttcccatcttgacgagctgtttggaatttcccatactgactggaagtgtttgtttaatgggtgcaacacaccaacatggcacatgtatacatatgtaacaaacctgcacgttgtgcacatgtaccctaaaacttaaagtataataatgataaaatttttaaaaaaagaaatattgggggaaaacagttaaattatttgatctatagaggctatagtaaggttcattttgacaatatattattataagcccatgtttaattgtaaatttgtggaagataatgcttttttacccagttgtatacgtatagaaagactaaatcggttcagattcacattgaccaactgtctgtatgcaatttgggttgttctgttctgtaaaatgtgctggtatatgattctttttatgttatctcttcaagtagtttagaattgaactacaataaggggcttttatgtccagtgaaataaaattctggactttacgtgaccttccttttccttccctgctttttccaccaaaatacaattttctgatattgtaattgaggtataccctgcttggagaacgtaagagacaaatatttaaacttaaggaagaaaaagaagatacagaaaatgatatttggctttggtaggtggaggaaagaagcaatttttcacctacattttagtaatatcagtgttataaagtaaattccaaacccatctttttcatcccattaacttataagctctgtaagtacaaaaccatttgtttaaaaagcttactaagtatctggaacaatgatatgtccctgctggtgaccgcaaattacttattgattgatgaaggaaatctgagctgctatcagcccagcagccccatagctggcactcagcaggactggataattgttgtcctctctcagtttattggagcattgactgaattgactagctcaactgattgtctcaacatcatggagacacagctctgtttgtggttcatacgactcaagcaagaaagactttggtttggcctgctaaagagaatatcccacaacgtatgcttgttgtcagtgagttcccgggaaatagttgcatgaatagtggggaaaattcaaaatttcaggattttttggaaactggaaaagtaggggtgaacatatgggtgtagcatatgggagtgcccaggtgtccaggaagagaaagagggagctggtggcaggtagaatcttcagtgtcacttagtgtgcttattacattatcagagtggaacccattacaaattttgtcttttcccaagggtatggtagaataaaatctaccaactctcaagtgtaactttgcctagcctccaagaaaaaagaggaaaagttaagagaaggggtggcagtaacaagagggatttcctccagacccagggtaagagttgccatgcacataattcacatcaccctggcttgccttggctgtgccttctatggagagctctttctccccacacacatgccttaggtctccgttctctctctgataatgtcaaacacaggaggaaaagaaaatacttgtaagccatctgtaattttaacctatttctgctttcaaatgggttggaattgtcaacttctcgagagttagctaagtgttatacataagttatatgtttaaggagaaatgtccaaatatattaatttttctctttattttctatttttagggagctcctggagttgacagtagcatagaaggacccacaggcttgaaaggagaacgtggaagacaagtaattacgtgggcttgtaaaatcgtgatgcaacaactgtggggcttaagttcttgttggtagaatgtgaaatgcttaacaaaaaaactggaatcaaagtggatatacttggtacagaaaaaccattattaggagcaaaatgatcttttctcctgcctatgtactactctgggatttgagaaacattcttgccttcctcctctaaatttggggtgacttgattcaccaagacacatcctcgaggtcttcatgaatataaacattggaactctaacttaaaatatagggctagctgatagaaagaactgtgctagcaaaagagctgttggcctttccagtatctggaggtaacataccctaaaaagacatattagtagtacattataaaaagaacaagatctggtagatagacgtggtccacacaatcaagaaaagttcttgggcttaatctcataagtcacaatgtggtcatcaaaacctgttttcagtatttaaaaatagttgtctaaaaaatgcgttactggattttcttggataatgttcccttgatgactgtacctaggaaagaagtacgataaagtggaaagaactgtgctttggagacagcactgggtcctatctcatgctccgttgcttaccagctctggatcctgggatactttctgtaaaccccaattttcttatctgtaaaatagggtgaatagcctattttagaaggtcatgatgggaattaatgatatttaatttaatgacattataaccttcagtaaatattatctgccattattagtaagtggtaaatgtaagtcccatagaagactcataaattattgcatacttttgtatctaatgatcatctcaagtgatcatctagtgatcatacaagtctttttattatgagactttatttacagtaaggtaataatctgtttgattagccaaaaggatcaagcaattcaaaagtagaaatccaaaccagtagtagccatacctgacacatagtatgctttagttatccacactgtggcaacgtagtagggatagtttgaattatctgagacatgtaccccaaatacaacttagacagtagtgatgaatgatgaacagatgaagccatgtcattagcattttttcctgcaattcctcatgacttatatagaaatgtgacttatgatcagtagagttcatgccattttccaaaggaaaggtaactctctcattggtgtgtgaacctatctatcctccctggagtaaaagttgatgttaaagagaaactctgtcaatgctgcataattaccgtcacacatctgtctgttcctttgacagggcagaagaggctggccaggcccccccgggacaccaggctccagaagaaagacagtaagagcccttctagacaaggagacccactgttttggtggctcatgttgtggtgaaaatggctgactttgggggagtgggtgggatggttctgctggagctcactaccttgaggaaactaacttatgacatctcgcagaccagggctggcaaaggacttgggaaagccctggaagctgaggtaggaaagtgctgactgcagagcagatcgccagtcaggagagagagctgggcaaagaaaaccaaaaaaacctccaactaggggaaaagtggtcaaagtgtggcctactagctaggttgagatcacctgtgatagcgttttaaatccaaattctattctttctttgccaaattgtatgactattaagaaaagtaagaatggtgattattaaagtcaagaaacaatagatgcttgtgaggatgtggagaaataggaatacttttacactgttggtgggaatgtaaattagttcaaccattgtggaagacagtatgacaattcctcaaggatctagaaccagaaataccatttgacccagcaatcccattactgggcatataccaaaaggaatataaatcattctactagaaaaacacatgtacacgtatgtttattgcagcactatttacaatagcaaagacatggcaccaacccaaatgcgcatcaatgatagactgaataaagaaaatgttgtacatatacaccatggaatactatgcagccataaaaaggcatgagatcatgtcctttgcagggatatggatgaagctggagccatcatcctcaggaaactaacacaggaatggaaaaccaaacaccgcatgttttcactcacaagtgggagttgaacattgagaacacatggacacaggggaacaacacacaccagggccagtcgggggttggtggggcaaggggagggagaacattaggacaaatagctaatgcatgtggggcataaaacctagatgaacagttgataggtgcagcaaacatggcacacatacacttatgtaacaaacctacatgttctgcacttgtatcctggaacttaaaataaaaataaaaatttaaaacaggaaaaaaaaagggggaaagaaaagaagtcagtcctggtataggcatatctgagagtgaaattggatcacttgcttgttgggggtgcagttttggtttgttttttattttatttgttattttttcattaagtactttaaaaaatttgtgtgcagaaaagcacagagatgataaaatattcaataagaagagataactttaataaaatatacttagatgcctacatcagtgtctaaattaggctgtctcgtttcattttgctaggttttctttccattctttatgtagttatccagccttcaatttcccccaccccctcccaaatagaaaaatgttttaaaattaagcacaagtagaaactactttagtatattgcatttattacacattgtcttttctgagcagaagtttatagagccagctattacactccatcgaaaaatattttttttatcttggagcatacccgtgttctttgcaaggcagagaaaatgaaaagagatcgtttaaaatatgcagaatttgattgctggaaaagtgctttactaatgcagtttcaacgcttataaagaaatgcatttgctattcatttcactttctaaaagggtgtagtcagcttatatacccctggaaaatattttcaacttaaagaatatcatccaggaaatcctggcatgtaaggatgtactttcactgttttatagcctccaggggctaatgcaatattgctatgcattatttaaaccacaccactcccatgaaatatgacccccatcttgggttatagcttcagccatgtcattcaggagtaaaagtgggacttcagttgaaatggcagagtaaagctgttttcacactattcctcttacgtgcatctcaccaaaagcaacaaaagaaattaaaaatggcgaaacagagaataaccacagcttcaagctgcaagtaatgacaaatgccggccaactgtttttaaatctcaaccctaatgagtaaggatttagaaagctgatacatcaagtgtgacctcatgcagggatcagatttcttcaaaactaactgccatagtcctgaaaaaactggtgagcaaaatccagggacatggtagattttgagtggagcagggaatatacacatagggccatagttcaacagaggaggcaaaatgagaaactggaaaatattccacttttattatgtacaactagcaaccaaggccatggaggctgcaaacaatgaggagagaagtaacagtgtctatcacaacacagggaaactatgacttaaggggcttcatatgagtgccatgaatctctaaacatcagtagtagaaggaagatgtagctctaaggaaaaagaaatcattcgtttgatgagaaagtgtttgaggcaacatatctgtgtcaaagccaccagccctgttccaggcacacatccccataatttcttcaataaacaagtggtcctattcaaagatggtgaatggtcaggaacattaataatctttattaattagatgattaatcaggacgtaaagctgcaagagaaagaaaaccatgggcaaagggcagataaagcctcattagaagaggaattattcaaggaaaaatatgaattctggcaaatagttctccagggtctcaaagaagtgaagataacattattgctcttaaagtttgaaacacagacaatagaaagtgaagaaagcaagttggcagggcttgaggagaaatggaagggaaaacagtagagatgtaagacatgttaacacctgacatttctattctttgttttttcttcaagtaaaattagatgtaatattttaattttaaaaaagtttaatatggttgctttttaataaaacactatttagaattttatctgtaagaatgagtatagaagatgtcaggaatcatgattaacataatatttctagatggaggagttgggtgatttaaaaatttttttctgtattctctgtattcaaatattttttaaatcagcatgcatcattctcataacagtaaagtcattctttgagaaagtagaaaaatctagtgttcactgcagaactctaaaatgaatgttacaatgagcatggaggacttgtcagtgcacttaggttccactaagcgggtaagtgattggaggatggccagtggtaggagtggcatgcggggaaataaacagcaaatctgacctttactcatttgaacacctacagtccaccagcaacactactaaatactagaaataaactcaactacaagcttaactaagaccatctttcctgtcaaggaacttagaatcatgttgtagagtgtggtttctcagcctcagcattattggcatttgggttaaacaattctttgctgtggggggctaggcctccgcccattagctgccagtaacacccctgacctgtaacaatgaaaaatgtctccagatattgctaagtgttttctggggaaagggagggtactaaatcccccctttcctgctgagaatcactttgtagaggggatggacctgtagagctaataagctgttaccagtgctatgctagcagactataatgaattgggggaaaaggcaggaaggatggacaagaaggaagaatctgggttagaatgtggtagttctgtgggggagatgaggaagaaagggggagcgtctctgagccaaacctgagaattagaacagattcttgtgccaaggataatgagaagcaactgtagcctcaaattaatgcatatccttcattcctagttagtctagagggctgttagttatgacttgcccttttcatccctcttggcactcatttacaggcattctgaagtggtgtcggacaattgttcatcattgtaaatgcttgccattaagacttagtattaatgtgatgttttaccattcagaatgtcctgcttttttcttgataattctccatcctgatggttctatatctaggaaattgggccctgtaaacaaccagaaagccaggctttgggggaatgaaggactgagtaccctgttcttggccatcttcttctcaggtcgctttggggagattttctttcctgacgtgcccattcacagtctgtttaaagataagtcaggttatctagatgtgttatcagacatttgcaagtcgttgggtaaaccattaagatattttggaatttcatctttctcatataaaacacttgaaaattttaggcaaaattgcaaaatcatcttccatatttccttgttttctgtctctcacagcaacccaatatatctctcccatgactttcatttggagcttaaatcccaagtaactgggccgggcgtggtggctcacgcctgtaatcccagcactttgggaggctcaggcgggcggatcatgaggtcaggagatcgagaccatcctggctaacacagtgaaaccccgtctctactaaaaatacaaaaaaaattagccgggcgtggtggcgggcgcctgtagtcccagctactcgggaggctgaggcaggagaatggcgtgaacccgggaagcggagcttgcagtgagccgaaatcgcgccactgcactccagtctgggcgacagagcgagactccgtctcaaaaaaaaaaaaaaaaaaattccatgtaaccattaacaaaggtgctatgcgatcgtttctagagatattttcattatttgtgtgaatggtggattaaagtctttctcatccattaggcttataaactaactagggtcaggagtcagattttgttcaccaccacccagcccagttcctggaagggaacaggaactcaataaatatgtgttacaataatttattttcagcaagccctttcaaaatcaaaccttaaagacaaaaggggaaaaaatgtttgttgatgatgtttgaaacattgcgacagcaagccagaggtagatttttgaaaatggaggtctgttccacttccgttaaacatactggaagctctttattttgcttgaatataaagttccattcagttcctgttaccacaaccagatgtatccacctaaagctggggtctgaccatgtacttttccagctccaaaaaccctagtggcttctgctaaatgttgtggggacctttcagcctagtaaccctgctacttccctttcttctcacacttttgacacagatggccttactgctgctaccaaatatgcttcctgtttttctgtttctacttcatagcttaggctgtacctctgctggaaagacttgatacatcctctgcctgtaggactgctacccatcctctgaaacacccatctcaaaaatctcttcttccaggaagattttcctgatttgaccaactggatatgattgctttctttaaaacttgtatttctatctttccccttttttatggcatttgcaatactttgccttgtaaatatttgtaatatttatctcctcctcccaaacccaaagaatgagggtcccctgaggtcaggactgtgtgtgtgtgtgtgtgagatctttatgctgccatgtttcccatctagtgtgtttcgtgggtagtatatttttcaaatgaaaatatctattgctatttgtcaaatggaaatatctactgatatttttctgaataaaagagaagtgaattgaatcagaacagacaaacccatgtgctgaaggaatggaaacagcttattttcctccctctgatagaagatttagggtttcatctcatgatgattcatcagttttgtaaaaataaaataaagacttctaatcatttccccgaaatacagtctgtttcttttataacaatagtgtattggtccattttcacgcttctgagaaagacaatacctgagactgggtaatttataaagaaaaagaggtttaatggactcacagttccatgtggctggggaggccccacaatcatggtaaaaggtgaaaggcatgtcttacatggtggcaggcaagacagaatgagagccaagtgaaaggggaaaccccttataaaattatcagatctcatgagacttattcacttccatgagaacagtatgagggaaaccacccccatgattcacttatctcccactgggtccctcccacaacatgtgggaattatgggagctacaattcaagatgagatttgggtggggacacagccaaactatatcaaatagattttgactgaaatatgattagcagaatttaaagtttgaaatactggcctctcagagaacatctcaaatttcaatcaagacaattccgattttattgaattttgcaaatgctgggttttacttttactataacattactgaatgatcctaggttagacaacaaaatgtcatggtctcttgatttccaggtgtatgaaatattgatctagaatatatctagaccctacacttacatatgacagtggcaggaaaactcgattatgtagtatcattttgattgaatattaatatactggattgagtagcttttgaatgtttgagataattctttcatttttctcaggtaagcatattatttggctttttaaaaataaaattagtttggccatctttatgtctgaacttaatctattataaagtacatggagtcagttttcccagtttttcctctggcctcctgccttttggctagtttacccctgattcctggattccttggtagtgcttaaggaaaaataaaagaaataaaattcaaataagtcaatttgcagcttgtgaacagctctagtaaaagtttaacagagaacaaattattgaccacagtctgttctcataagtatctgtagatttcaattgtctattatttctattgtcagttatttcaaggagacaaatattcaattgccctaggatagaaatttagatttagcagtattttgctttcatggtacagtggaaaattgaatgttgtaagcactatgtgggaattgttatgtatgttggtgccttaaagtgtccattatgaatttaaatcatatataaaaagcattttttctgaattaatgatatccaccttttcttctattttaggcagctcatggcagaaggggacatacaggcccacaggtacaatgatttttccccttaactccaaataacaaatactgcatccaatcagggagctggaataaagtctctgtaaagtctctaaacttccctttttgatgatattggttatggaatagaaagctgaaaaaattttaggttaagattttaagagttcatattttaaaatgatgtgggaactttggtcaaaaaccataaaaaataatggccagagatgtacttagcacaattattgttaaatttaactttgcttggattttaagtacaaacttgaataacttagtagatgacccttcttttacattttcatttaactttggaatcttacaattataaaaaaccccatataagccaaaagaatacaataaaactcttgtacaaattggatattctgagtattttgttcaaaaagttggttaaatcaaaaaccatatcccattctcattgtgtatgttggtgatacattatatgtgtttcatgaacctataatatttatgaaagagtggttgtgacttataattttataaaacacacatcctcagattaaaaatacaatgaggataaataatccactctcaatggcaacatggtgagactccagaatgttaaagataaaaagcatcttaaaaattaccacagagaaaagatagctttactcatgaaaagaatgaaaaattagattgcagcaacttctgttcagcagtaatacatgccagaaaataacagagtaataacctgaaggtacagtggaaaaataatcgttaacttagaattttatacctagctaaactatgtgtaatgtaaaatagacacttgtagacaaagagaccttaccatccagacattatccctccctcccacatactttttatttatctgtttctgcttctgtaacaaaataccttaaactggtaatttataaacaacagaattttatttcttatagttctagaggctgggaagtccaagatcaagacatgagcagattcagtgtctagtgagggcttgctgttcactctagaaatggtgccttcttgctgcatccacacatggcagaaggggctgacagctaccttgaacctctttataaaggcactaatctcattcaagaggatggagtcctcatgacctaatcacctcctaaaggccccacctgttaatactattgcatggaggattaagtttcaacatacgtgttttgaagaaatgcatgcattcagactacagcacatttcaagtttagacttcagcaaaaaggagaacctacctagtaaaatggcatgatataaatgaaatgaaattggagagagaagatgttaaaaaatttttttctgatttctaggaaaaggtatctgtaagtgacatttaatcacatccaactatataacaactgaaatataaacttaggctctcctaatagttgcctaaattataaacttcttgaattcgttatgctttttataattcttgtctgtgacagaattcaagaacaatatgaagagaatgctcaacttttgttccctagatatttaattgatttgaatataaatattaatataatcgtgtaagatgcttgaagatgtttgaagaaaatgtgaactaaattttgagtgtttttaaggccacatagctaagttagatataatacaaattttataagaaaggggtgggggctgcatgtgtgcatgcatgcatatatataaagatggaaaggaaatacaccagcatactagctatggttatctctgatgagattatagatttttattttctttgtatttgcatttatttttcacctttttttttttttttttttttttttttgcaaagatcctgcattgacattgtgactgaaaaaatatttgtaagcttgcaggtaaaggagacaaaatgttcaggaaacagtgttaacagattgattctttctcgccacagggaacagcaggcatcccaggaccagatggacttgaaggctccctgggacttaagggccctcaggtacatatcaagaccaatcagggtgtgagaacataaagaagaatctgggaatggaaaaatctgaggacctgatagaaaccttcaaatctcccttgcagaattccatgtttaaagttctcatggtaataaagtaaggaagcaacacagtttggactcatgcagcacttggtctgctttaagttttgtcccagtcaagaagtgaaaagtgaatgagcaaactaggcagtggtccttgtgtactgggttcagggtaagtaagatattccagggagagcttgagccaaggaaaatgttgaacctcagatctgggaattgtggtcaatttagcacagtaatagttcagtgttacatatcttggtgctcatgatgtagaaaaattggctttactcttaggaaagaattgctcgaaagacagctggagacatcagtggggttatctgcagtgcagcactcagcctgcccttgccagctgacttctccagggagctacctccggcactttttcctttgcaaggaacaagccatacttggctgtttacactgatcacatgaggggttgcatgaggggtcacatgaggggccagagagggcaaaatttagctaacatattatgataaaggaaaggaaatcctagcaaatactgagttgaaagaaaggtcagaccacaaaaaagttagaacttttttttttcctctccaaagttagttttgaaagcttgaggaataagtgttctatttggcataggcaggacaatcaacggctctgctatttttcaaacttttaatccacatagttaaaaaaagtaactattatatgttggcagctttttgcctggaagttgggcaacatatccttaaacatcagaagggaaagtttgtccacattttgccaagattcagagcagtgcacagtcttccccttggacctttatctcttcctagcttgattacttttctttgttgttgctttccagctgaggaaagctcactttttttttttttttttttttttaaccttcaagcgagaaatagttgccactggggttgtggggaagcatttcaatagattgactgctttatttcatgctaagcaagtaatactatggcatcccttcttccattttatagaaacttactttttttaatggtgtaatttaaaagcagaggcaaaaaccaaacacagcatgaaagtttctctgcataacatatgaaagccacagctaataggcagtataatattccaaaagtagaaatagtcagatttcatcttaccacataccatatcttgtttatgaccagtcttcagtgtggttattgaatagaaaacttatttaaatgttctggtttcagatgtatatttgtaaggaatatttttctttctaacaagagaaatgtagggaaatgtagaaagcaatatggaaaagctcaaccattcagtatttttttccaagccccagtcagtttgactgcagatcctcaactgcctaaatttcagattggacattcatattcctgcacaaatgagaatgagctccacaggccaggatggaaggaaaggcatgattggagctctctttcccatttctgtccatgttactgacttagtatttctacttgtaatattcaatttaatattcaatgttctcttttaggcaaaaaataatgctttaattctatgtacttagggcccaagaggagaggctggtgtgaaaggagaaaaaggaggtgtgggaagtaaaggtccccaggtatgtaatgagaaaaatgattgcatctgactttgatcttggcttgatatgtctttgtggtttcttccatacaggtggagttatttactgcttgtgaaccaggaacgtgtattaggtttcacttcagctcaatgtggtggccacatcacatcatggtccccatcttgcagagcaggctatcactatcagacacagaggtagaaaatctagccctctttgcctcagctgctcagctatgtaaatcaggtcgcatcactcccctgatctcaattctcttggggtttcccatccccatcccacccccagaatacagcctactttagtagtcctcaaactggctaaatatgataatctcctgggggaattctaaaacattccaccacctagaaccttccccaggacacttaaatcagaatctctggcaatgaggccagggtagcagtaatttaacttctccctaggagatcttaatatagacctagggttgggaatgactgctctgcattagcactcctccagattcacagtgcagaagaatcccctagaggggattgttaactagagaacttgttaaagtgcggattctgagtcagcaggtcaagggcaaggcctgagattctgcacttctagggcattcccagatgatgctgatgctgctgatccagaccacatttttaatagaacggccctacatgatctggccctcacctacctgctatcatagtacgtattatttgtttagctgtttgcctgtctctcctcctagattgcaagctccataaaagataggactttgtcttattacactctatccctagagtccagaatatcagtacctggcacatagtagagctcaacacatatttgaataatgaatcaaacagtaaatgagtgaatgagacacagttggaaattgtgttctccactaacactagggtaaaaggattccattacgtgtgtacgttagttgaaccaggcagtccaatatgtaagtggttgtgtttatcaccagaaagtttaagaaaatttaagaggctatttgcataaacttgtatctcatgacactattttttaattataatttgtattttaggtctaggtgtacacgtgcaggttggttatgcaggcaaactgcatgtcatgggggtttggcatacatattattttgccacccagataataagcatagtactaaataagtatttttttccgatcctttcccatcctttactttcaagtaggcctcagtgcctgttgttcccctctttgtgtccatgtgttcttgttgtttggctcccacttataagtgagaacatgtggtatttgtttttctgttcctgtggtagtttgcttaggataaaggcctccagcttcatctatgttgctgcaaaggacatgatcttgttcttttttatggctgtatagtattccatggtatatatttactacattttctttgtccattctaatgttgttgggcatttaggttgattccatgtctttgctattgtgagtagtgctgcaatgaatgtacacatgcatgtgtctttatggtaggatgatttatattcttttgggtaaataataatgggattgctgggttgaatggtgattctgtttccagttctttgaggtatcaccacactgctttccacaatggctgaactaatgtacagtcccaccaggagtgtgcaaatgttctcttttctctacaacctcactagcatctgttattttttgacttttaataatagccattctgactgtatctcactgtggttttgattttaatttctctaatcagtgattttgagcagttttaaataatacaaaactgcgtttaacactacaaaaaatataagtgtttgttgtgcttctctccctgggtttcatgggaggactgcagggctcctctgacctgtagcgcaacacagggttgacagcctgggcgtaggggatgccgctggattaaaaaatgagaatgaggcccctctggtgaggtctatgtacatgagggtgagaggtgggttacaagcatgggggcatcagaaaggggagggttgtatggagtgggattgagcatattttcttatgcctgctggccatgtatatatcttcttttgaaaattgttcatatcctttgcacacattttaatgtggttgtttttggcttgtaagtttgcttaagttccttaagattctagatatcagacatttgttggatatatagtttgcaaatattttctcccattctgtatgttgtctgtttactctgttgataatttcttttgctgtgcagaagctctttagcttaattgggtctgtcaatgtttgtgttgcaatcgcctttgtcatctttctcatgaaatccttgccaagtcctatgtccagaatggtgtttcctaggttatcctccagggtttttatgcttctagattttacatttaagtctttaatccatcttgagttgatttttgtatatggtataaggaaggggcccagtttcaatcttctgcatatggctagccagttctcccagtaccatttattgaatagggagtcttttcctcattgcttgtttttgttggctttgtcaaagatcagatagttgtaggtgtgtggctctatttctgggctctctattctgttccattggtctagagtctgtttttatgccagtaccatgctgttttggttactatggccttgtaatatagtttgaagtcacataaggtgatgccttcagctttgttctttttgcttaggattgtcttagctattcatattcttctttggttctgtataattttaaaatagtttttttctatttctgtgaagaatgtcattggtagtttgatggaaatagcattcaatctgtaaactgctttgggcagcatggccattttaacaacattgattcttcctgtccatgagcatggaatgttttcctatttgtgtcatctctgctttctttgagcagtgttttgtaattctcattttagagattgttcaccttcctggttagctgtattcctagatatttttatttttacatttttgtggcaattgtgaatgggattgcattcctgatttggctctcggcttgtatgttgttggtgtataggaatgctactgatttttgtatttcaattttgtatcctagaactttgctaaagttgtttatcagatcaaggagcttttgggcagagactactgggttttttagatataaaatcttgtcatttgcaaacagggatagtttgacttcctttcttcatatttggatgccttatatttccttctcttgcctggttgctctagccaggacttccagtactatgttgaatgggattggtgatagagggcatccctgtattctggttttcaaggggaaggcttccagcttttgcctattcagtatgatattagctgtgagtcatagatagctgttattattttgatgtacattccctcaatccctggtttgttgagggtttttaacatgaaggtatattgaattgtatcaaaagccttttctccatttattgagataatcatgtagtttttgtttttagttctatttacatgacgaatcacatttattgatttgtatatgttgaaccaaccttgcatcccagagataaggcctacttgattgtggtgaattagctttttgatgtgctactggattcgctttgctagtattttgttgatgatttttacatttatgttcaacaagaatatcagcctgaagttttcttttttcgttgtgtctctgccaggttttggtatcaggatgatgctggcctcgtagaatgagttagggagaagtccctctacctcaccttttaggaatagtttcagtaggaatgatatcagctcttctttatacatctgatagaatttggctttgaatctttctggtcctggctgttttttggttggtaggctttttattattgagtcaacgttggagcttgttattggtctgttcagggattcaatttctttgtggttcattcttgggaggttgtttgtgtccaggaatttatctattacttctggatcttctagtttgtgtgcatagaggtgttcatagtaatctctgagaggtctttttgtatttctgtggggtcagtggtaatgccccctttttcatttctcattgtgtttatttggatcttctctcctttttttgtattggtctagctgactagtctatcttattttggcaaagaacaaattccttgatttgttgatcttctgtatgattttctgtatctcagtttccttcagttcagctctgattttggttatttcttgtcttctgctagctttggggttggttttctcttgcatttattgctataaacttccctcttaacactgccttatctgcgtcccagagattctggtatgttgtatctttgttcttattagtttcaaagaatttcttgatgtctgccttaatttcattatttacccaaaagtcattcaggagcaggttgtttaacttccatgtaattatatggttttgggtgattttcttagcactagtttttatttttatttcagtgtggtccaagactgtggttgatatgattttgttttttttctaatttgctgaggattgttttatttctgattgtgtggtcaattttatggtatatgccatgtggcgatgagaagaatgaatattctgttgttttgagatggagagttctctatatgtctattaaatcaagtgttcaagtacaggttctgagtatctttgttaatttcctgcctgcatgatctgcctaatactgtcatgatactgttttaaagcatgttaattattgcttgtgaagatatttgtttttaattttgatgaaggtgcttcttcaaaaagcataaaaactttaaaatgtcatggtagaaataacttgatgaaaataactatttcgcattcatatccttgaatcaataaaagcttgctggtaccataaattgaaatttgttaaagatggaaatgccaagaaaaacatatatcatgtgattatctcatctgtttatataaaatatggagatgtgagtgggtggaaatccaaaatcttggtatttctcttggtctagaatccaaaattgcatccactggctgtgcagagcacgtctgtgaatgagtaccctttaatcttgctttggcaagattggtcatggccataaatctttcagcctcttggcattgtcagagttagtcagaaggtaccacttctctctagtctacgtctaccatttttctgactggaaaacatggtttttctttctgtgcttggttttcttgaaatacctttgtcagtacagtgaaaatgctatttcaaagatgtgtacaattttttatgtttaggacatggatgaatggggtcacaaagttgttgtgtccaaaagaaagccacagagatgaacacaatcagatacacaagagagtattattcttcaccggttctataaattccctgccataggtttcatattgttttacagcacacaaggaccagccactggaatagaataacatgagtgctttgtaatttcaggatttgaagtttttcttaggatatacgtttaagaaaagatgtgatttctgttgacaatgttctgaaggcttatttaactggcattctgtataaatcaaatgtgtgctaatccagccaagtatatgactatgatacaaaagaatacagtccatggcacaatgaaaaggaagaaagagctttgaaaggaatggcatattcttttctaccttccttcattccccctttggtttaccttaaggtcctattttaatttaatcaatgcctgaaaaaaaaaaaaaaaaaaggatggaaaatcagacacaaaaatacaaatttcaattgaagctgtaattattttttaaatacttatgctttcttagtgaatgaatcactagtggcttgtacaatatcaagaaagttcggagatgttcaatgcagtttggagtccggagtagaatttctgtttttgtctttacaaagcatagcacagtggtaaatggtatacggtctggagccagactgcctagcattgattcctaactttgtaccttactagctctgtgaccttggggaatttatgtaaccaccttgtgcttcagttttttactgtaattataaggatggtaatagtagctacctcattggattgttgtgaaaattaaaccatttaatgtatgtaggtgcttagaacattgcctgcagtcacaagctctatgtgtttgttattgctactatattgtatcagtattacctaatttaatgggagtattttgtgctcaaagaatgcaggtcaccattccaagaaaggccatgatagtaatataacaatacgtaacctgtagtaatcaacaagtttcatcattctgtataagctaagtttggtggtccattagccattccttttactcatttaacaaacatttactaagtgctgcttgtgtgttgggccctattctaggatacaaggatgaatgaggtatagactctagcctcacgtatacccaatctcataaaggagactcatacaaacaaacaattgacatgtgacctgctgaatgttaaaagagaattatactcaatgtagagtgatgtggtaaagaatggagttaaatgagatgagcgtatttggttttgctgaatgagcaggtgttttccgggtaaccaaggaaaggcaggcatgcagaaagaggatggaaccaagttacacagagatatcaaggtgagttttgggaaccacaaatggctcaatatggttggagtgtagaatgcatggagaagtattagaagttaaggttaaggactagtactgtcaagattgacatctcagatgttttggggtttgttcttgcattagctcaccatttgatggcctcttgatttttgttttcttagacttagctgatatctaacttttaaagaagctcagcacttgatctccttgtttctttccaccttgatatttgttcattgtgagttttcatacattacccccacacaaataaaaacaagtgacaaggattccttttaagtgtgggaacaccctgtacctcttctaccctgccttatctaatccaaagtcaaggtgtccttggcaatgccccaaccattaaacctaaactcccaagtgcaatctcttctgataaggtgctaagcacaattttcaaataatcgttaacctctaaacacttctttcctatccttgcttaacactaaagcagttgtggttgccaagggctctgtaactaatactcaacctgaggaaaaaaagtgggacaatcaagtcccacttttggaggtttgatgtggccccagccttatgcatcaagtttggagagccacattttttttagaactccaatctgggctaatgcatagatggtaagagtttgggaatcctgtcccacacaagggcctcagagcagcaggcatagtggctgggactttagtctttagagtcagatacaattaggttcatttcccatctaatcctcttattaactgagcaatttggatgtaaatgccttgagaaactgtttttgatcagtaaatggggttaataacaggcatctcactgtgttgtaaaaatagaagactatttaccactcagcacagtgccttgcacaaaatatgaatgctcaataaaaggcagccattacatcaaagccaaagaagatttgatctctagctaatgcccttcccctttaaatgccctaagcttctcttaaccctccatagctattcttgatctcaagtcaactaagctctttcattctttgatatctttctgagggtgacaatttttttgtctttcttttagaaaccaccagtgtgattccttatctaaccagcagtgtttgagtaggtgatttatctgggtaaccattcactgaggcttgagccttattcatctaagtcacaaacctcactttggtactttgcaagatcctgcatgggaaacacaatcaggttttctgattctctaatggcaaggtcctgtatgtatccaaccatctactcatccaagacattttttattttgaaagttcttaaaacaggataatctctcattgttcttgtgtgtgtttgaggtaactacacatgaaataatctcccaaaatcatcctctgtctcagaatttatgtctgaatgaagaatggagagtaggcttctagacagatcttccaatttatacattgcttttcaggacaattagaatctctctacttctctgtgcagtgcatgaaaatttcatatggaaaaccaacaaattaaacacagtagttcatccctcttgagaatctttcctgggtagataaatggatgggttgatgggttctaggtatcctatgatgcgccagagatatgaattaataggacgtgcccgttaaagaagtatacagtctagtctctaaggaatgagaaagagaaatacactaacaattacttacagcgtagaggaatcggggggacaagcatgagacccaacacagctaggaagtttgagtattcttcctgaaacagtgatgctaaaggtaggatttttcagaggagggagattgtacctctccctagagggaaaaaaatggaccagctgagggaaaaatttgcatgagtgtggagacgtaagacaaacatttgatgaatcacttgctttgatgtgcctgaacataaagcgatggaagtagtcacagaaaatgaggctgcagaggcatgcaattccaacattttgagggattttgcatattaagaagaccttaaactttattctgaaagatattcagaatttcagacaaagtggtaacatcagcctgacattttaaatctctctctaaaaagggtggagaatggattagaggaagacctggctacagttaggagagccaagaatttaggcaggatgcaagatgggcctgaaggcaagtaatgggaatggaagagggaggggtacagaaagtagacagattctactgtgggccttgtagctgaggggttttgagaagtgaggtagtggaagggtctaggataattctcaggtttctggcatgggtctcaatggtagtaaagggtgatactattccttgatgaaaagaaaatgagactggaagcatgatttagggtaaatatgattgttttgagaatccatttctattcaataggatgtccaatgggaattttatttatttttttagacagagtctcactctatcacccaggctggagtgcagtgacacaattatagctaattgcagccttgaacttctgggctcaagtgatcctcctgcctcagccttccaagtagttggcactacaggtgtgtgctgctgtgcctggttaagtcttgagttttgttttgtttttttttggcatagaggcttgctgtgttactcagccttttaatatatggctctggtgttcagttgagtggttgggacttgagagcatgtatttaggagtcattgtgtagaagtgatatgtgaattcatacgggtgccattcaggaagaggggataaagtgagaacaataaggccagaggatggagccctggggcacacagaatttaagaggcaaatagaataaggggagccttcaaaggttcatgagaggagcctagagagggaccaggaagaccatggttacttggtgtgacagaagttaagggaaaagtttcaaagaacacatgatcaaactcaaaaaaggtgagggcaaaaaagtgtcaactggactgaacatgaaagtcaaaggagttagctccatgtagtggtggaagtgaaagttagaagggaatgggttgagagctatctatggagggtgacaatattgagaattttctttaaagatgaaggaagggggagagatagggtattatggaaagattcttatctttgttagtaaccaatttattgttcaacaatccttcctattaggaaattttttatgtccaatgtattgctttttaaattttttaaaagatgaaaatgttaatgttacaatatttttgttctgaacgaaataaatttgcaagtgtcatgctcattacgcaaaggctggtttatttacttttaaattacaacaaccatgacgaaaaaattgtgcaaatgatttcagctcactggggttgggattatttacaaatacctgtaaacagttgtaccaaaagagatttctctttccatatgtttagatatcccaaaggaaaaatctgattccaagtgttaataacagaggaaggtagttgtgtcatctctgaattggtattttaaaatgttcagtctaaagttgttccaatgaaacatgccttctagaatgttggaaggacttacttccattatatctgatagcttttccatatagataggtgttatatttatcatctgtttaagttttgctatgttcttcaataagatcttaaggctttctttctttaggttttgcatctttcttgataaatttattctaagcattttacagtttttttcttcttttggtaagtgggaatttatttacatttacttttctaacttatcactaggaaagagaaaattatttcagaatatttatcttatgctacctaaacatatcttatgaacactgttttagtaaagtttcttaagctttctaatatacatatcatatgattttccaataaagatcattttgtcttccaaaaaatgttttctaccaaagccagtcctttctaccaaaggacaagaaggattatagttcaaggcaaatgtcatttggaatggcttctttaagtgttaggcattttaacaacatctgttcttagagcaaaacaacctgaaatcactttggaagagaaaactcacaaggaagcacaattctttagacaacatctggcatgaattactttattaattttcttttatttaccagtctttatttgatggtggcaatacttttttccagagcaaggatcgatacagccataactcttctctcgtctgtggttcactttcctcttataagacagagggtttgaagaaaagttgctttatgttttgctatatttgcaaaccccttgttttgtttcaggggcctccaggacccggaggagaggcagggaatcaaggccgtttgggaagccaaggaaataaagtaggtcacattctttatactcaccaaagttgaggttttctgctcaagagaactgtgtctaattgtattagccagggccctttcaacacaaacaagaacacattttctggtccttaaaccctggcttgattcttagagagccaacaacctctaaggacatgggtgtggacctggatgaaatcagggattccagctcagtgtaatttaagaggggagggatacaccctattggagctgagggatctcagggaacaagggatattctggggcaggccttcctttctctcttccaatctctcttaatttcctccccccgcctacccccccctttttttttttcctttcctccattcacacaaacttttggtaagcaccttttaagaccaaggcactgtactgagcgttcggttgggctgaagaatcagctccaggagagacatctttgttttggtcattgattccatcctccatgcttagaacagtgcctggcatgtaatatgtgattagtaaatattgaataaatgaatctgtgggtggcataatatatatgacatgaaaccaaccccaaagaatattttcataacaatctatgacataaaataaagataaggggctaaaatggagttttaaatggcattattagaagtatttctgggatgcaaaaagaggcatcatagaaaatacagactttgagccgggcgtggtggctcacgcctgtaatcctagcactttgggaggccgaggtgggcagatcacgaggtcaggagatcgagaccatcctggctaacatggtgaaaccccatctctactaaaaattcaaaaatttagccgggcgaggtggcgggcacctgtagtcccagctactcaggaggctgaggcaggagaatggtgtgaatccgggaggcagagtttgcagtgagctgagatcgcaccaccgcactccagcctgggcgacagagcgagactctgtctcaaagaaaagaaaatacagactttaagcaggacttagaagataaaaattttggcaagcagagaagggaatggggggactgtaatgagaaaaagcggtgtgaaggaaggcacaaggttggaaaatcctgagagaagaggaggtatctaggcatgaaaaatgatcctgtctggcaggccaaaaacaacaagaaagcctgtggtgaatctattcagtggccagcacggtgttatctaaaacttttgaatggagtggatgaacacagccagacttttggaagattttaaataggcaactcagtgtagaaatattatgaagcttaggctgtgcatggtggctcacccctgtaatcccagcactttgggaagccgagccaggtggatcacttgaggtcgggagttccagaccagcctggccaacatggtgaaaccctgtctctactaaaaatacaaaaattagccaggtgtggtggcacatgcctgtaatcccagctactcgggaggctaagacagagagaattgcttgaatccaggaggtggaggttgtaatgagccaagatcctgccactgcactccagcctgggtgacagagtaagactccatctcaaataaataaatattatgaagtctgagagaatgaaagctaggagaacagttggtacactcttatagtctccaaggcaaatagtgattaggtgacttaacggggtgaggacttaacttgtgatgattccatagaactcttccaataggggactgatgcagagaggagtgggctagatgacttgggggcttcgtgtatgaggggtaaccctatcacagacataggaaagtcattaggaagagtgggtttaagaggaaagaaaatcacttgggggatagaggaaagggtttaggtctggttggagatgtaaatttcagagtcatttggattaaaaataactcttggtgatgcctctttgtaagaagtccaagaggaaacaagacaatgaattattaggaaggaaggaaaatcaacaaaaaagcacactggattttgagtagagttcaagaagggaggtgaagagtaccaactggtaaagaaaagttaaggaggggaggagtggagaagccatgatatctggtggctaagacattctaaagaacagtttcaaaagtgtagcaattgagaggagagaaagggagacaggactgcaaaggaccgagaaatgtgcgaggagaaaatggataaaaagctgtaaactactctttggaaaacctaggcctttaaggggaagaagaagacattaactactcatactggcaaggtctaggaaaggttgatgtgggatattggtttgtttttaatgacaggagagaccagcatgtttataatcagaggagaaagccagggagaaaagaggagattgaaaatgtaagaaagagtagacagagtagatgattaacggagaaatttggcaaagaggatgagcttgagggcctgagaaaaggggttaactttgtactgaagaattgttcaaggctgatatgatggagtccagcagttgaatgttgcaaagacagttaattggaggatgtaacaagataatggggatgacaagaagtcaactgcaaaaggaagggacttctatggcatgtagtgtagcaatatatggcatgtaatcgggaaatcaaagtttggaacaaagacaatgctgccttcttgtccctgaagaaggctctaggggaagtggtgtcactggtaaaaatcaagtttatcttaccaaggatagacatagataaagggaccctagagttggatagaggtggccgtggggaagtagataaacaggagcagggcagttgtgccttagaagatcattattaatacaaaagacttggtcaggggtcgggggcaggtcaagaatttagatggcaagtgccccaaagaaaacccaaatcctctgtattgccccagggtggactgggcactctagactcatgattcactgagataaacctcaaacacttacccctaccttactccagtaagttcacatttccaggaggcaagcaacctggcagttaatcctgggcttaacacttgactctaccaataaccaagcatgtggccctagaaaagccatatgactttccttgtttccttaccataaggcagatgttcttaaattttagtgtgcatatgaatcagctgagaagcttatgtaaaagcacatattgttgggttccacttaccagagtctaatccaatgggatccaagaattttcttgacacatgaaccctggatgtggctgtggtccccacagcacactttgagaaccgctgtcctaaaaggcatcaaggcagatgatctcctgcttcccttatatagaatcctattcttcgttaccccagagttcagtgctggtggtcacttgtccattttcccttatgttggttttctgtccttaaaaaagatgtgatgattccccaccttttaagtgtaggttgcacatactttcacactttcttccaaagagtacagtagagaaggggagggagatggagagtaacttggcattagggaaacttgactgccattatctcaaccagaagatcaaggttaacatcaacactgatgtcatgttgattgtatatacccttaatatgatgtgatgagaatggccttttacctgtgtaatgttcctcccccaaacccataagcccagtctaatcagaaaaacagcaatgggggactttctacagactgcctggccaatacttctcaaaatggtcaaggttatcaaaaagtctgagaaactgtcccagtctaaaggagcctacggagacataccatgtggatcctggatgggatcctggaacaggaaaggaatatcaggttaaaaagaaaaaatctgaataaagtatgggctttagttaataataataaatcagtattgattcggttgtgacaaatgtaccctacaaatgcaactagtgtaatgtaatgttaaaaataggggcaaattgatgtggacatacaggaactttccatattatgttcacaacatttctgtaaatttaaaactattccaaaattaaaattgttacctttttttaaaaaggagttaactttcctctgtaaacctgtgttgatttcccatgtagctgaactttcctcaacataatactgagattgattaataacacacagtagatgttctactagtcagaagttagaaactattgccaggatatcatgctcccttggttaacttgattctccctcagaatattaaaactagattaatcaatctgccatctttgcagaggccagatgatttgcatgaatcatcctggaaacgattttgttaatttttttaaaacagtatagagcttttctcttgactcattttcatggcattgagctgctaagatggcaacttgccctaaacaataaatcatgcttgctgaggcttcactgatcaatggaggacacctccctggccaacaacagcagttcctcttgtatcacttgcacgacacacagttctgggcacaaacccattgttgtgtgtgatccacacagatgagctgaattagtgccatcatttccaatttccaacctaaaaacaatctttctgtttaacagggagaacctggagatctgggagaaaaaggagctgttggctttcctggtcctcgtggcttgcaggtttgtattttgacactagttttgatcggattcttggaatcttttagttcagtagacatctggtgtggttctctgaagagagttttaaggatacaatcctcatgaagttttatagttttatagaaattaggagggatattgtcttcatcttagttccttggccagctttcccaaggtggcaattccccaggtgccaaacatcatggccagaatgcttttgaagccaaatagtaaaatgaacaaaacttgtcttcagcaatcccgtaaccctttttccagcctttccttttatcagagcctcttcgtcagaaacccattccatccttcccccactgctcagggtttctacaagggtcagacagtagccaatactggggcatttactagttgtttttgtctagcaaactgaaaatggtattaaaatagaagtgttatcagggagaggtaatactattatctcctcttattgaaagattattatatgcctgattttttgttcatttaatcctcatgacaacccatgagtaggtataattattattcccagcttacagatgggaatacctagggacagtgcattgtctgtatctgttactaacaattgcctttagtactactatcataaaatgttggtggcctgccctagaaggaggatcctgtgtcctgcttttcctttatcaaaccaaaaagctggcaatgttgtcctcttgaagaataagcctgtctctatctgtagtctgggatgttggtaatcaattgctctgtttacagggcaatgatggcagtccaggttatggtagtgtcggacgcaagggagcaaaggtaagtcaagtctgctggaagctggacgttttccatttattttttgttgctggttttgtttgccacatttaagagaaaaagggaagcagggaataaggcaatcttggacagttagaaatatatttcagtaatttatttgctgctatcccatgaggaatgtgatagaaaagaatgtgatggtttaaggtgcaggcaacaagtgaaacttgaaaataaattttctgttttctgcagtgatatgcggccctagtctgacttgttccagcctgaacagtgcatgtaatcttagccactccaggctcaagtttactcagggaagcattccaaaatcagtcctcttattattatgtttgatttagccagtaatgagaggttgtgcaggagttttctaaatgtactggcccaagcaataacttaaaaataaaactgtatatcagaagagtaatttgatattgtcactgaatatttaggtggctggaactgagggataagtttaccaagaccagtgatttctgtatactagcaatcaccactaagaagtcagaatgaaaaagatcccaccataattacaaaatacaaaaaacataatatagttaaggatatcatgtctgcaaaatgtttgagacctgtaacagtgaattgctgagacagaaaagagaacttcaataaatggagaggcattccaagatcttgttggaaagtctaaaatattgaaggatgaacataattccaagtgaaatcccaacgggaataatgcaagaggccatctggaagaataaaggaccaaaaactagaactatttgaaaaataaaactaatgaatgagggatttccagtgaaatgttcattagaacagagaacagttaatattccataatataatcccttaacatcttacaagaagggaaatattaagtagcctatggcattggaacattagccaccctataaaatgaatgtatatgaagtttataattatgtaaataaatttttatgtgacactttcaagtaaaaatttagaatatactcagaaaaacatttatcccaattgtgttacattgcatttttaaaagctaaaaggaaataacaaaatgtatataatctttctgggcagtaagattttggtgatttttcttctttctattttttgattttatacatgtttgaggatttattataatcaggaaatgagctttattttaaattaattatatacttttttatccagtagggattattatatctcttcaattatagtctttgaacaaagtaaggtaaacagaggaccctaaaatgaatgatcaagtttagactctccataggctttccaaatttctccaatgaaatccattttaagatcgtgtcgaagatggccgaataggaacagctccggtctacagctccctgcgtgagcgacgcagaagacggtgatttctgcatttccatctgagacctgcagctgagggtcctgtctgttagaaggaaaactaacaaccagaaaggacatctacaccgaaaacccatctgtacatcaccatcatcaaagaccaaaagtagataaaaccacaaagatggggaaaaaacagaacagaaaaactggaaactctaaaacacagagcgcctctcctcctccaaaggaacgcagttcctcaccagcaacagaacaaagctggatggagaatgattttgacgagctgagagaagaaggcttcagacgatcaaattactctgagctacgggaggacattcaaaccaaaggcaaagaagttgaaaactttgaaaaaaatttagaagaatgtataactagaataaccaatacagagaagtgcttaaaggagctgatggagctgaaaaccaaggctcgagaactacgtgaagaatgcagaagcctcaggagccgatgcgatcaactggaagaaagggtatcagcaatggaagatgaaatgaatgaaatgaagcgagaagggaagtttagagaaaaaagaataaaaagaaatgagcaaagcctccaagaaatatgggactatgtgaaaagaccaaatctacgtctgattggtgtacctgaaagtgatgtggagaatggaaccaagttggaaaacactctgcaggatattatccaggagaacttccccaatctagcaaggcaggccaacgttcagattcaggaaatacagagaacgccacaaagatactcctcgagaagagcaactccaagacacataattgtcagattcaccaaagttgaaatgaaggaaaaaatgttaagggcagccagagagaaaggtcgggttaccctcaaaggaaagcccatcagactaacagcggatctctcggcagaaaccctacaagccagaagagagtgggggccaatattcaacattcttaaagaaaagaattttcaacccagaatttcatatccagccaaactaagcttcataagtgaaggagaaataaaatactttatagacaagcaaatgttgagagattttgtcaccaccacgcctgccctaaaagagctcctgaaggaagcactaaacatggaaaggaacaaccggtaccagccgctgcaaaatcatgccaaaatgtaaagaccatcgagactaggaagaaactgcatcaactaatgagcaaaatcaccagctaacatcataatgacaggatcaaattcacacataacaatattaactttaaatataaatggactaaattctgcaattaaaagacacagactggcaagttggataaagagtcaagacccatcagtgtgctgtattcaggaaacccatctcacgtgcagagacacacataggctcaaaataaaaggatggaggaagatctaccaagccaatggaaaacaaaaaaaggcaggggttgcaatcctagtctctgataaaacagactttaaaccaacaaagatcaaaagagacaaagaaggccattacataatggtaaagggatcaattcaacaagaggagctaactatcctaaatatttatgcacccaatacaggagcacccagattcataaagcaagtcctcagtgacctacaaagagacttagactcccacacattaataatgggagactttaacaccccactgtcaacattagacagatcaacaagacagaaagtcaacaaggatacccaggaattgaactcagctctgcaccaagcagacctaatagacatctacagaactctccaccccaaatcaacagaatatacatttttttcagcaccacaccacacctattccaaaattgaccacatagttggaagtaaagctctcctcagcaaatgtaaaagaacagaaattataacaaactatctctcagaccacagtgcaatcaaactagaactcaggattaagaatctcactcaaagccgctcaactacatggaaactgaacaacctgctcctgaatgactactgggtacataacgaaatgaaggcagaaataaagatgttctttgaaaccaacgagaacaaagacaccacataccagaatctctgggacgcattcaaagcagtgtgtagagggaaatttatagcactaaatgcctaccagagaaagcaggaaagatccaaaattgacaccctaacatcacaattaaaagaactagaaaagcaagagcaaacacattcaaaagctagcagaaggcaagaaataactaaaatcagagcagaactgaaggaaatagagacacaaaaaacccttcaaaaaatcaatgaatccaggagctggttttttgaaaggatcaacaaaattgatagaccgctagcaagactaataaagaaaaaaagagagaagaatcaaatagacacaataaaaaatgataaaggggatatcaccaccgatcccacagaaatacaaactaccatcagagaatactacaaacacctctatgcaaataaactagaaaatctggaagaaacggatacattcctcgacacatacactctcccaagactaaaccaggaagaagttgaatctctgaatcgaccaataacaggctctgaaattgtggcaataatcaatagtttaccaaccaaaaagagtccaggaccagatggattcacagccgaattctaccagaggtacaaggaggaactggtaccattccttctgaaactattccaatcaatagaaaaagagggaatcctccctaactcattttatgaggccagcatcattctgataccaaagccgggcagagacacaaccaaaaaagagaattttagaccaatatccttgatgaacattgatgcaaaaatcctcaataaaatactggcaaaccgaatccagcagcacatcaaaaagcttatccaccatgatcaagtgggcttcatccctgggatgcaaggctggttcaatatacgcaaatcaataaatgtaatccagcatataaacagagccaaagacaaaaaccacatgattatctcaatagatgcagaaaaagcctttgacaaaattcaacaacccttcatgctaaaaactctcaataaattaggtattgatgggacgtatttcaaaataataagagctatctatgacaaacccacagccaatatcatactgaatgggcaaaaactggaagcattccctttgaaaactggcacaagacagggatgccctctctcaccgctcctattcaacatagtgttggaagttctggccagggcaatcaggcaggagaaggaaataaagggtattcaattaggaaaagaggaagtcaaattgtccctgtttgcagacgacatgattgtttatctagaaaaccccatcgtctcagcccaaaatctccttaagctgataagcaacttcagcaaagtctcaggatacaaaatcaatgtacaaaaatcacaagcattcttatacaccaacaacagacaaacagagagccaaatcatgagtgaactcccattcacaattgcttcaaagagaataaaatacctaggaatccaacttacaagggatgtgaaggacctcttcaaggagaactacaaaccactgctcaaggaaataaaagaggagacaaacaaatggaagaacattccatgctcatgggtaggaagaatcaatatcgtgaaaatggccatactgcccaaggtaatttacagattcaatgccatccccatcaagctaccaatgactttcttcacagaattggaaaaaactactttaaagttcatatggaaccaaaaaagagcccgcattgccaagtcaatcctaagccaaaagaacaaagctggaggcatcacactacctgacttcaaactatactacaaggctacagtaaccaaaacagcatggtactggtaccaaaacagagatatagatcaatggaacagaacagagccctcagaaataatgccgcatatctacaactatctgatctttgacaaacctgagaaaaacaagcaatggggaaaggattccctgtttaataaatggtgctgggaaaactggctagccatatgtagaaagctgaaactggatcccttccttacaccttatacaaaaatcaattcaagatggattaaagatttaaacgttaaacctaaaaccataaaaaccctagaagaaaacctaggcattaccattcaggacataggcgtgggcaaggacttcatgtccaaaacaccaaaagcaatggcaacaaaagacaaaattgacaaatgggatctaattaaactaaagagcttctgcacagcaaaagaaactaccatcagagtgaacaggcaacctacaacatgggagaaaatttttgcaacctactcatctgacaaagggctaatatccagaatctacaatgaactcaaacaaatttacaagaaaaaaacaaacaaccccatcaaaaagtgggcgaaggacatgaacagacacttctcaaaagaagacatttatgcagccaaaaaacacatgaagaaatgctcatcatcactggccatcagagaaatgcaaatcaaaaccactatgagatatcatctcacaccagttagaatggcaatcattaaaaagtcaggaaacaacaggtgctggagaggatgcggagaaataggaacacttttacactgttggtgggactgtaaactagttcaaccattgtggaagtcagtgtggcgattcctcagggatctagaactagaaataccatttgacccagccatcccattactgggtatatacccaaatgagtataaatcatgctgctataaagacacatgcacacgtatgtttattgcggcactattcacaatagcaaagacttggaaccaacccaaatgtccaacaatgatagactggattaagaaaatgtggcacatatacaccatggaatactatgcagccataaaaaatgatgagttcatatcctttgtagggacatggatgaaattggaaaccatcattctcagtaaactatcgcaagaacaaaaaaccaaacaccgcatattctcactcataggtgggaattgaacaatgagatcacatggacacaggaaggggaatatcacactctggggactgtggtggggtcgggggaggggggagggatagcattgggagatatacctaatgctagatgacacattagtgggtgcagcgcaccagcatggcacatgtatacatatgtaactaacctgcacaatgtgcacatgtaccctaaaacttagagtataataaaaaaaaaaaaaaaaaaaaaaaatgccagttacattctaaatccctgtagcagcatttcagggaaacagtttgtcaatattactttcctttgtcaaatccgtgaaatagcagttgatttcttaaaataaatctcaagctataaaatgttaaaaaaaaaaataaataaataaataaataaataaataaataaaaaaaaaaaaaaaaaaaaaaaagatcgtgtcagagacacatggccaaatgaccacctatgcggttatatgcatacaaaagaaggaaagccgaattgtaactcttcagatgtatacttttagccacctaggtagttatgatatgttgatgaaacccttaaatactttaacttataatttagtttgtttctcaaatactgctatttcacttccagatttcaattgttttggcccttccttaattcagaggtaccaaaactacacagggcagcaggtaaattgaaaatcaatgtagacttcattgggtgatgtgtgcctgtataaatctttcctcctgtccattacagggacaagaaggattccctggagaaagtggacctaaggtaccgtgtgcttcctagtaactagagatcagtcagaaatactcctggggtttatgaaatgtatcctaggccagtagaagaacagttaatgataaataaatgtcctacctttgtgcggagaaggagggaagaaagaaatagaccaatattttttcaatttttaagattatacatttgtttaggagtgtaaggcttaaaaagtatttctagttttttaattagtatgagaagatagaaaacttatccttttaaaattttttcctcaaatttactccttccctctatcatatatattttcttatttactgaaagaaaagtataatgtaaggccaggcgtggtggctcatgcctgtaatcccagcactttgggaggccaaggcaggtggatcacttgaagtcagggattcgagaccagcctggccaacatggcaaaaccccatctctacgaaaaatacaaaaattagctaggcgtggtggtgcatgcctgtagtcccagctactcaggagcctaaggtgggaggatcacttgaacccaggagatggaggttatagtaagctgagatctctccactgcactccagcttgggtgacacagtgagactctgtctccaaaaaaaaataaaagtagaaagaaaagtgtaatgtaaagaaaataagagttatttgattttacctgtctcagttttcccaatatgtttataaatcatctttagataactagttagcaatgacatcttctaccttggagataccactttttctagaaacccttactgaactcagtaaatgccaggtcctatgatagagtcagaggataaaataaagaacaaagttcatttctccaaagagccagtgttctcactggggagacagcagagtgaaacaatgctgacgcagtgtgctatgtagagagttacacaaatggaaacacacacactcacactcttcaaagatgactgttaaaaatgcatacgaaaaatgtcttcatgttagaatcagtttaaagatgcaaatatgttacatatgtatatgtttgattttaataactattttactttaataaatgtatttagggtgagattggggaccctggtggtccaggagagactgggctgaagggagctagaggcaaaatggtaagcttcttagattccaattgctgacaacctcactacattgggaagtcctcctttgtgcatttacaataatttgagttgtcttttgttaccagtgacttgcaaaatgcatgtgttttctattaaggcaaacttggggaaggggaatggatagtcatctctcaatgccagtgcaaaaacaatgaactgtttgcttttagtgagcaagttcacctgttttagctgccagggtaccatacttaacactggtaataagattttttaaaagaaatccttgtgattcaaaacagcttttacactgccaaaatgtagttagtttaatcctgtctccctggcaggtttactgcaacctaatgcccactggcatcttgtcttcactattcaggttttgttaatctacttttaatgagatacatgcagaaaggtcttctcatttagctcaaggaggttatctcttgagctttgtgagaaagtttgcttactgtgtaactgagtaggtctttattctgtagaggttcttagatattgcctagtgctttgagtcacttggaataaacacaggtctccagtacaattcatcctgtaggcttgccttgggttcctgtggattaagaatggatttcttgcatttgctgactctctatatatcttagactgtgtataagtgagaatgctgttttagttttttaaaagacagtcctaagataattgtctcttgatacagtgatcatcttttttcttcagaacagcactgatcaggcaaactggtcttaatttatcatgtcaattagcaagaattttaaaagtctgataaaaatgtatacttgaaatggttttccagttttgtcttcatagctaattttgctctgatctatttttgtttctacaaactatacgatctttatgtatagatattacttgtgtaggttttaggggtacaaaataaggaaactcctcttcttctgcctcttcctccccttccccctccccttcctcctcccctcccctccccctccccttcctcctcccctcccctccccctcccctccccctccccttcctcctcccctccccctccccttcctcctccccccctccccttccttcccttccccttcctccccctccccctccccttcctcccccttcctcccctccccctcccctccccttccccctccccctccccctcccctgccctttgtccccctctctctccccttcctctccctccccttcctctccctccccctcctctccttccccctccccttcctctccctccccctcccccttctctccctccccctccccctccccttctctccctccccctctctccctccccctccccctcctccaatgagaactgcttcccacctataatgcttgtcctcatacatgtttttggatggctatccattaacattatgctctaaaaaaaaaagatgaagacagatataattagaaaaataattggaaaagactttcaaattaatccagatgtcatctgcattgaactatctctggatcatttatttcccttggcttattaattaagaagtttaaccttgaacatcagaagcacgctaacaagttcatggttggatccctccccacaaagtcacattattcatttttaaagacaataaacgaatgggaaacataaactttttctgttggcctttgaaaatgtttgaaaatttttttttctccattttggacaatttatcactgttcttaacttgctctttccacccacccagctactttttccagctttacattagtgtttttggatttgaagttgaagtttagacattgaaaatatccaggttttccctctaaaagagctgaagtttctattggaagattttggtaaaacttcaacttaaattctgaatgcttcgtcagttctctttgaatgattatactccttgtttaaattctctaaatcttcaccttgatttttttttcctcaaaaaacattttttaaattttgctatgatttttaacctgttttattttgtgtatatatgtatgtttgtatgcattttgtttttctttttcccacctttaaaagcacgcacatagtttaaagcagggtttctccatatcagcactgttgacattttgggctggataaggctttgttgaggggctgtcctgtgccttgtagaatgtttatccacatccttggcacctacccactagattccagcatcaactaccctctgtcctacccacaccccaggttatgacaatcaaaaacatcttcagacattgccatatgtcccagggaaaaaaaggagtcaaaattctcccttgctaagaaccactggtttagagagtcaaataacaaagtttgttatattaaaaaaaaaaaaatccttcaccccctcactcactcccatttccttctccccagaaacaacagctgtcacttctgaactgatttgtttcagaattgacaatatgcctctaaatatcatacttaccttcttacttttttgatttataaattttaagcattatgaactgattcctcctgctataaaagttgctgatgtacctttcttgattttcccttatctaaatcctgtctgaaaacatttagatgaggcaagtgttctctccaacttaatcccaacgcagagccttccaacctgacccacctgatggaggttcgtctgtggctggtgcccagctgccatactgcaattgtccttcaccttcacccttccctttgcctctcttctgcgttggatctctgcttctcattcttattctcagactcctcttgttggatttctcccttgtttcgtggaaaactcatccagtagcctgctaagaaggggtgaatgaaaggtatagtttttgaaacagctaacatctgaaaggatttgtagtaccttgagatgtgattggatattttggattggatattccaacagttctgggttggaattaatttctcagaattttgaaggctgtcattcctccattatttctaacttcttttgttacttggggaagcccaaagccattctgattcctgatgtggccagtgttctctctctggcaccttattgcataatttctctgtctgcagtgttttgatatttcctgggttttatgagttgatgtccatttttatccattttcctgggcattaggtaggtccttcataggcactaggagcctggaaatatgtgtcctccaaagaagtgttggtcaattattttgatgatttcttgccctttatgttctctattccctatttataaaatacctattattgggtgtattagtattaattttcttattttttctgttctgtcgtccagctttttgtctttttgctctactttctgggagagttcgttgagtttatcttacagtgtttcatacttgaattttcaagagcttgttattgttctctgaatgttcctttttatagcatactgtttttgtttcatgattaaaatatcttacctttctgaaaatataaatatttttgtcttttttgcccaacatagtctgtttcctgcattttattttcctttctgttttgaactctattactcagatttttcaggaatgagctatttcttcatatttaagaattgaagacaaaaagactgattggggtcaggtgcggtggctcacgcctatcatcccagcactctgggaggcctaagcaggcagattgcttcagcccagcagtttgagaccagcctgagcaacatggccaaaccccatctctacaaaaaatacaaaaattagccacgcgtggtggcatgtacctgtagccccagctaccagggggctgaggtgtgaggatcacctgagcccagaaagtcttggctgcattgagctaagattgcactactgcattcgagcctgggtgagactgagatcctgtctcaaaaaaaaaaaaaaaaaaaaatgactgattggaagctctgagaacatgagtggggcttgtcaactaccggtttcccaaagagagtgatctagctaaattctttgtttagcaaacctctgaaatcaatatcttttggtctttcttctttgtctagtgaagttctcctgaaaaaacttcttacagtttcctacctggagagtaaaggtctggctgccagctttctaggagccatatagaaaaagagagctggagactcacacatttactgtacataccctcatttactctccctgtctcagatactgtaggttctcaactcagcctggagtcccaccttggttttacctctctttgttgctagggtgggaaaagggacattcacccaacccttgagaatagagaggagatttggagattcctaaaatgattttcaactaaacatctttacttcacctttttccctcacctccacttctggaggttcccggtgctgccaaatcctcagccttctgggacgtatgatataaaacacattggttcttggctttccctgctgctggcttaggattcaactttctcaggtctgttcagtcatttaacacttacacatttgctttccagattcacattttatggctgtcatctcctttttcattctccccaccattgttttttgcctttaaaataatctacttactgtcattttagtaagatattggaaaggaatgaaagtaaatatatgtactcaatctgctattttctccttggaggttaacctttatcttctaaataaaaatattttatttttcactcaaccaagcacactgtcaatatcattggaatgcccaaaggatatcaatcattatttactgttttataggtaatgcttttacaaattaagttgattttaaacttcattttttattcctgtaaatgttgtaaatcctgtggcattttgaatgaagaaagaaatattccaatttttaaactaagtcctagctttatgataaacttattgttgaatgcacgtgaaaatatttctgacatctagtaagcagataacaactgtttttgttgctgttattccccatttcattacaatatttccaaataatgattgtgtttctgttgttttaaaagtttttgtatttcaattttgtttttctagactttttgctttttgttttttcagtttagttacctaccactccatttagataaaaagttttcctttgaccagcaattctagtcctagcaatcttccctaaggaaataatcagaattatgcatataactttataatagcattgccttataatagcatcacctaatagtgaaatcaatcacttgagagtcacacggaactttttaaaagatgattattaatgcctgacagtaactgacagaattgaattcacctggtatggaagaagcagctgtgataatagggtgtcctggtgggtgggggtcctattacctgttgcctattgcagcaacaaacagtaagggactaactaaattatctattgcctgttacaacaacaaacagtaagggactaactaaatcatggtacaaccatgtgatgggatactatgcagctgtgaaaaatgattttgccaaataatgtttactaactgaaaatgtccagagatatatttagtttaaaaggtaacagagaaaagtatgattcaaatgagttttaaaaaggaatatatgtcttaattccaaaaaaaataagaaaagacatcaaaatgttaatgaggattatttggggaagaagggattgctgggaatattttttccttctttatgttttttggaaaactctcaattttctaaaataaaagtgaaattttcacttttgaattttcacctttgaattttaattttttaaaatttgaatttacacacacacatacatatatgtataaatacaattttaaaataaattctcctttgagatatctgctgggcttccaggagagatgggatcccctggggaaccaggacctcctggacgtaaggtaagtagaaaaactataaaccacagcaggtccttttccattaaaaaaaaaaaagtcagtgcatgaaatcttcattgtccaaatgtgcatgccttctgtctctgcttcttggccacttttttcccacctttatgggggagaaaatactgattaaatatttagaggtgaaaaaatactgattaaatacatctcttgagagagaggggaaattgaaggaggaaaccaaaagtacttaaactaaaatggtatttctcaattatcatattctgtatctgttcaatctttctatatgtaataaatgatcattggatgaatggaagtgaaaggaaataaatagtgactgtgatcaatgttgcattcacatggaacttatttgcttcaggaggtcagggggggctctgttgcatttttttcttgggtgtctctctttgaaagaagccagactcctcttcttctgaagatgggattgaacacataagattaaaaccagttccatttgttcttctatcccaaactctgacagattatatgtgtgtgtgtgtgtgtgtgtgtgtgtgtgtgtgtgtgtgtgtattttttgttttgggaaggtagttgagataacctttccagatgttcaattgagtccgatcattttgtcagctaacaaatgatgggaacagattaaggttcagctctggctgctgttcagtggctcagtcaaagaatgggggttgaagaccttgaaacttctgctatgaaagagggcaactgcacatgtgtggctcactttagctagtcctgaggcgtaggcgtgctccagagctctgcggcaagtgtcaggttgtcagctccatcctggtaattctggacaatgcttgttagccagagatggacccggaggaaagcggcctctcaaggcttgtgtgcaccaagcttgctgcttaaagtttgttctttccagaatgttactgttaattaggtaatgagtacctacctgcattcttttttgcctcttacaatttaatgagaataaaacttttaaaagttatcactttctgagggcaatgttggtgcacactggctactgatgtgtatgtctagaggcattaaaacaatgttttgtttgttttcctagggtgtgaaaggagccaaaggcttggcttcattttctgtacgtatctcccgactacaacagagtgctctgagtgctccattcaatttacttatttttaaacctcagggcctagcagtttgttgtttaattgtttctgttttattttcgaactgcagacatgtgagctcattcagtatgtgcgagaccgcagtcgtaagtaccctgcttaaaatgatcacccaagttgtcagcattcatacaagaaaagcagagaaacctacactcagaattgaattcaccagccaatttcttaaaattggagatgtcactgcatgtatttttgagtcagcatagactggtgacttttaactccctctctggttgctatcatgtctattgaaacccatgtcaagcagtaagaaataatctattgagtgcttttaatctaaagaaaattgagatttgatgtctgaattcacctaatagtgaaatcaatcacttgagagtcacacggaactttttaaaagatgattattaatgcctgacagtaactgacagaattgaattcacctggcatgaaagaagcagccgtgataatagggtgtcctggtgggtgcgagtcctgactttggtttattgtttgttattcctttcccgggaagatatgtttgattattttttgttggactgattgatttgctttaaaaattcatagtaatactcattctgccaatattttttctttctcaaaattttaaaatcaaaatgacattttgatttggcaaatgctgattagaatttgttttaaacctttctaacagcttgttctatcaaaatatgtgttgataccatcaaaaaaaatttcatgtgcaagattaggagagagttgactcttcagtgttcatctacaaatgcataatgactttccaaataacaatatgacagaaaagaggagccaaaagtttcctccagatattttgggggaagaaaaataaattagagcctatttcagtagagaacattggtctcaaagacagacatttaaaaactttgaatgcagtgtctattggaactctgtctttttgtagcagaatagaaccatgatgggaatcaaaacacatgtatacattgagtcatgaagatgggttgttttggggctcagttagtgcggtgggttttatgacataggaaccatgtaaattgtaatgactcaagggcaaatccaagtatattgagacctgatattttaaaatttaagggactccataaaaaatcgcaaatctaaaagtgggtgcaaaggtatttcaaaagtaagtgttatttagaacaaaaaagaaatcataaccattaacttttgcatattttattttataagagtatgtgattgtgcgaacaacatggctagggttcctgccaggaaaggcattgcaaggggggacccctgcaagagagaagtctaaagcagcattgtccaatagaagtttctgcagtgatggaagtgttccctgtgatgtccagtacagtagccacaagacacatgtggctttgagcatttcaaatgtggctagtgcaactgagaagctgaatttttatttaattctaattaattttaatagctgcatgtggcttgtggctgccatgttgaacagtacaggtctaaagcaagtgttcatttaattcagagtaactccacctctgatacttacataacatataaatatgcatataatatacatatagtatacacatatatactatacaaagatatagatacatttgtgtgtatgtgtgtacatatatataaatgatagttatagatatctacatgggaaaaatttagagtaaagagaggttggatctttcagctttccaaattcagcgcacctccctgcaatgtcattttccctcccaggcaaaaagtctttgtttcttgacagctggctgcaggccgctgatttatggctgtatgttgtcccatttctcacatcctcttccctttggaaagaatagtgcttttaccaagatgttagactctgtctgcattttctccaaactctgttgccttgatttttgagtcatctacaaaaagcagacaggatagaacctttctttcctgcacgatacagaactctcttctcctaccaaataataatccaatctcctttgttcttcttccccagctggcaggcatggtgagtaatctttatttacagcatgctttaatcaagctctaaaatgtcatacatctggaaagatgagttagagcaatgtattggcttccaaatgacacaaattttatctgggctttctttgctgctgcctcatactggtagcagagtcttgcctccaataaatcactcagctgtagctgagcttcacagctatttctcaaccaagcgatttgcttttttattaataaaaaatcattaagatattaatatcttaatgactaacatcaccattcaccttgcttttaaaggttttaaaaatatgttggggttttttttagacatgctctgtcacacaggctgatcactgttcattgcattcttgaccttctgggctcaagtgatccttccacttcaacctccggagtagttgggactacaggcacatgccatcatgcttgactaatttttgtattttttgtagaggcagggttttgccatgttgcccaggctggtcctgaactcctgggctcaagtgatccacctgctttggcatctcaaagtgctgggattacaggtgtgagccactgtgcctggccaaaaatagtatttcttactcccttcattttctccctgtgtcatatcatctctgtcatccagtggttaattagggattaagatgcagaaggcagaataaaagtggggatgatcagatagcaagtaagtggaatgtgcaactcagataatgccagaatccatggagctcatgcctaatgttaattatcaagttggcttcatatttttcagtgctagttttcaggtatcttacaaatgcttcttacatgatgtttttctgtaaacttatcaccctcttatacatttatacacttttaccttttgtataagcccacaaacccatgtcctctgattgcttatccatgcatttaagaatatttgttgaaagcctagtaagtgccagtatgtgtagtaggcattagggatacagagttgaataatgaatctgcttcctgtgctcagaaacttccattcttatggaggatccagatcacaaacaaataaacaaagggaagcccagcacattaggtgctatttgaaagagataacctgcacattgtgcacatgtgccctaaaacttaaagtataataataataaaataaaaaatagaaagagataaagcataggatgctgtgtcctgggataatgtaagggggggagatgtttttggacagagggctctttttgggggcagtgaaattaaagtttagactgaagaacacaaaggagctgtcttttggctgggcgcggtggctcacgcctgtaatcccagcacttgggagcccgaggcaggcagatcacgaggtcaggagtttgagaccagcctggccaacatagtgaaaccccatctctactaaaaatacaaaaaattagctgggcgtggtggcacatgcctgtaatcccagctgcttgggaggctgaggcaggagaatcacctgaacctgggaggcagaggttgcagtgagccgagatcacaccactgcattccagcccgggtgatagtgtgagactccgtctcaaacaaaaaaaaccaaaggagccatctttcaagagctgggcatagggaactttaagtgcaaaggccatgaaacagaacagacctgggtatttcctaggaactgatggagcccaacaaggttgagacatagggagggggagagtagtgcataaaaacatggggaataggcaaaggccagagcaagctgagctttgcacattataaggaggctggattttatttgagttgtgatggggtgggtattaaagagtatgttgaaagtatgtaggggaggagcatgatctgattttaaaatattacttgggctgctatggggagagtggattgtggcaagggtgaagggtaggaaatgtcaaagccaaaggcctagtttagagaggactgtagtattcaggcaaatatggtggcgacctggataaggaccatcagtgttgtgtttaggttacatggcagtggtttgggctgatccttgcctccctgttctttttttcacctcctctgtggcaagtagcagtcctcagtacatagtgtgaggtcacagagccatgttagttggggaaccgcacatggcaatccttccctttttgaggagggcctcctaggtaccactgccatccagcctaggcttcttcagaatccttgggattcctggcagcttgcttggtttttagggcttgtgttttggaagctgaattagtccttaggtttttcccctaaaaaaacttgaatttttttttcatatcttcagccagtgctgtgaaccttcacccacccttctctctaaattgtatctgaagcatttttgttgttgtttccatgtgcaaataaccaccccccaaaaaatcagaagaatcactttcatgtttagttctactgacttttttaaacgataaaagtgacacgtccatttataaaaatctgttcagcccagtaatttagacttagagactaatacatgatttcctgtctccatcgagatgaacagtttgatttgggtttgaacatttattctcactggtacttcttttgcctttgaaggacatggagtcaaggacgggaggaggtcatagtttagcactaaggtgggcaaggcccagttggcccatggcagagggatgtctccttgccagcctacgtgagccccagcaagtctgagttcctgagcttgttgtaaagcaagatggtctttgctgtgtttattatctctgaatctgacttgctgatatctgaatgagaggaggcacctctccaagagaaacacatcactggggtgtccttttaccaaccaaatcccagcactaggcatctcacgtattattaaacttttgttatttctatacctgttgcaaagaactgctctttgttgagctctttttcattcattcagcatttgttagatatctgatatatggcagggactaataacttagaaggtcagcagatcctcttcctatccatgcatcataaactaggataaatgaacattaatcagataatcaaaaataagttatcaactgtgacaagtgcaaagtaccgaaattagaatgatttggaaccaatgagtatggatgcataaatatgcaattaacacttacagtagagtttaccaaccataatcagtttctctaagtaataaggcatatttattgagtaaacttgcatttgtaactgttaaacaaaaatgtatctgttaaagctttcctcagtctccttttagtgatgtatttctcacaatgaaaaagtctggaatgataattataacagcaatggttgacatttattgagcacctactatgtgccaggttctgttattctaagtactttacctgtgctgattcatttaatgctcacctcaggcctatgtagcaggtgatgttatgactcacattttacagatgaagaaactgaggcacagacaggatgagtaattcagacagggtcacatggctggttagtgattgggccagggcgctaaactctaccctgtattgcctactctctttgcgtctcattctttgctctgtaaattatgtcagttttcttccaatttttctaaaattatcagagctttcacagcctttcctttttaactcttattacatttccttattaagtaaaaaaagaaatgtgtttaactgagtgaagttccagcaacaaaacttgatacttttgatcgagtctctgcaggtgaagggtatttccaggagctctctattgtttagaaggaatttgataatgaactttaacatttcatataaaataaaactgaattccagatgttttccttttgtgcttgattcaaaagagcagactcagcttttggaataacatctataattattcaagatttaaatatattttacatgtttgttttaatacttaaattattctctttaagtatttgaatgcttaacatttaaaattactttgccttctatgtatctttttttttttttaaataaggatgctatgtgttaagggatatggtcttttaggaaaaccggaatgcccagtgcacccaaccgagttggtgtttgccctggaccactcccgggatgtcactgagcaggaatttgagcggatgaaggagatgatggctttcctggtgagagacattaaggtccgggagaacagctgccccgtgggagcgcacatcgccatcctctcctataactcccacgccaggcaccttgtgcgcttctcagacgcctacaagaagagtcaacttctcagagaaattgaaactattccttatgagagatcctctgccagcagggagattggcagagcaatgcggtttatttccaggaatgtcttcaagcggacgcttccgggggcacacacgagaaaaatcgccacatttttcagcagcggtcagtccgcggatgcccactccatcaccacggctgccatggagttcggcgcgcttgaaatcattcccgtggtgatcactttcagcaacgtgccctcggtcaggcgcgcatttgcggtatgaggatgaaacctttcacatgacaattcttacttatcttgcctgtattcagaagcccctatactaccttgccttcaaaatcagggccatttgttaggaagtttaaaaaattctggattggcagagtagaataagtatttcttactgtgtactgggaacacgttaagctctttctattaaatgggataatgtctattatttacctgtttaattttcacaagtagtatgtataaaatagatgatgagaaaactgagcatgcagaagttaagccacttttcacggttcccacagctaagaaatggcagtgtcagaactttactccaaatttgctgttctagtgcttccccaagctactctttgagttgcctctgaatctaaagatactgaatcaggaggccggtaaacatacatgtcacttagggtagtaattgttgctgtgtgatgagagccaatttgctgattttataacttcactaattataaaggaaaagccattgcagttatagcttcttagcttgaggagtaaaatctcaaatgtgttgcattcctaaataaattccctgggattaagatgactgatgataactttaaaatatcccgttaatagtggctcagtggcagggcttcatcactggggacctgctgggcccagcaaagggtccttccagttggcctcttggcaccacatggtgttctgttctccatgtggagaccgtgaaggggggggccagggagcagcaaagaggcattggaaaatttaaattaaaagtccagggccgggagcggtggctcacgcctgtaatcccagcactttgggaggccgaggcgggtggatcacaaggtcaggagatcgagaccatcctggctaacacggtgaaaccccgtctctactaaaaatacaaaaattagccgggcgcgatggcaggcacctgtaatcccagctactggggaggctgagacaggagaatcgcttgaacccaggcggcagagccaagatcgtgccattgcactccagcctgggtgacagagtgagcctctgtctccaaaaaaaaaaagaaaaaagaaaaaggccagccatttgaaaatttatttagagaaaataagacaagaaacaatcattgtcttcaagcgtatgaaaaagtattactggagaaaattagccagctgaattccaaatctgcaaaatcatagagaaactaggggtgacagcagtaggaaactttaggttttaaaaaagaatttttgaaaggcaatgttgatttactgggcatgaattaatgccagtagtcaagatgttacctttatctgcaggtcttttgtaagggtggtcactcacctgtggagggtgacttctatttttcctagattagaggctaaaagtggccttttgaggccatttccactgttctaaattttctgtgaaagtgttgaaataagcataacagagttggaatatatttctcatctgtaaaatatggaaagcagaaagcacctggttcctagagttagtgtgaagattaatttatgcaacactgcattagtgccagtacgtagtgagcaatcaagaatgacagcttttggctgggtgcggtggctcacgcctgtaatcccagcattttgggaggctgaggcgggcagatcacgaggtccagagattgagactatcctggccaacatggtgaaaccccgtctctcctaaaaatactaaaattagccaggcacagtggcgtgtgcctgtaatcccagctactcaggaggctgaggcaggagaatcgcttgaacccaggaggcagaggttgcagtgagccgagattgtgccactgcactccagcctgggtgacagagcgagactccatctcaaaaaaaaaaaaaaaaaaaaaaagaatgatagcttttgctttaattattagcattcagttgcttgatcctgaacaaaaatttgtttaataataatctaggttgtaaaggagctgaaactgctattattaatagtagcatcattgaactaaccttagaattatgcaaatgaaaggctgatggatcaggttcagatagggaaatgcaataaagtagaaaagagtggggccgggctatgcaaatagagttgctatgagaagtagcagtagctaaaaaattcaataagtgattttggttacatagtccttgtaattcccttatcccttggttttgtttagtcataaaaggagacaactttctctcctgatgcaaattgtgatataaacttaaactgacacaattccactcacccactcaaaggtgtgtgtacaacatttaacttctgaaaatgtactttgtgttttaaacttttgagtgttcagtctcacctagaaattgatgaatctggtttcttgattctactcaaatcttctagaaactcttaactccttttttgaagaagttcatctcaaaagagcaccaatgaaggtttaaattcttcataatgacccccattaatgtaagcagcattggcccccaacactgcaacttatatgtgattatctgattatttttcctaatttatgatgtgtggcgataggaacagtaactgctgatcttctagtttattggtccctgccatacatcagatatttaacaaatgctgaatgaatgaaaaagctcagcgaagagcagttctttgcaacaggtatagaaagaacaaaagtttaataatgtgtgagatgcctaatgctgggatgtaggttggttaaaggaaaccccagtgatgtgtttctcgtggagaggtacctcttctcattcagatatcagcaagtcagattcagagatgataaacacaacaaggaccacattgctttacaacaagctcaggaactcggacttgctatggagtcagagatgaagtcagaattgctcccaagtttcatccaacagatgtttaatgagtgcctcatcttatacaccaggtactgtcctagggtctgaggatacaggagcaaactggaaaaccaaaaggcccaccctgacgctggaagatgaaaccaagcagggttgtctggaagggctcaaaacagagccatatatgcaacttggttagaacccaatgtctgatattacagaagagaaattacattactacctctacttgccgccttctttcttttatccattctcttccattgtgctttacctacatttaaactgttgtccattattttttaagaacagaacttgaaagtctcatgatacaatgcatttttattgtgggtccacattttaaaaccctagtttgtttcatacctaccaaggcttttctaaatcttgatccatctgggagttaagtagtccatcatgaaatttggtacctgtgcagccatgtgtgttgggactcagaagcacccgctctgacagcatatactgatttccctgtttcttagcaaatggactgtgatcaccgtcttggaagtttttcatgatagtatgaagttgagtggcaagctgtgccttccttcacaaatggaggaccattttttaatggaaaaacatgttttttgtttgtttgcttattttgtccctaggaatttgcctttagatttgtttagcaattgcttcttctgataaaatttgacgtgctgcacattgaggcttctaatctagggtgaatctccctttccaatattttgataagaaatatgtcttttagctagcctggctttttattttacactgctgtgtggcgtcgcagctaagaggaaaattaagtgtagtctttgacattatagatgattctcatgattagagacagagttgaaatggggggagacttctcatggaaaacaagaattttggcacccaacctttttattttgaagataatttttatttgtttatatataattgtctagaagagaattattcataatattcattgtattttttcttagatgtttagacatgccccatgatgtttagagaagaaagagtaaggtatcattcagaaccctttgctaaatgccccaaacctcccatctgtgaatgtaatagctgtgctttcatccaagctggtgcttctttgaatccacaggagagtgagcaataagaaacataaataataggaccattttattttaaatctttagcccacattcagtttaaggaatttttctgtaatatgctaactatacttattccagtgatatgtggtaggatgaatgaactctaaaactacatcttccagactttattgactgaaagattacttggtcaagggggaaaggttgggggaagtggggaggtattgggtgagagtgcagaccccctgtggactctccccataaaacaactcactagaatcaatgagaaggttgatgttgctctaagttgacaccaatgtgttgatacgtgattaaatgtgagcctaaattatcagcagggaccaacaccagaaatatggaagtggtcatgttgtagacatgtagaacatgtagaatagaagactaattagcaaatggcagcaatgtttgggcaatgtcttgagaaacactgctctaaattaagttagagacctactgataaaaaactctaatcataaaggtagctaatacagaagatggaaggtagcccttgtttggggagagcaaaacttaaatcggagccttccataatccaccccttctgaggctcacttggctcatctttaaatggttgcaatagatgacatcattcctgatttcttctagatcaaatgttccatgatttttttttccccctggatcctgatcattggcaataagaaagctcttggcccttcccaggtagtctgagctatgctgtctgaactgacactgggtttggtttccagtcatttaccacaatccagatggagtgaaggcatgattcacttaaaacattgcaaagagacacctcttaatagctattaataatgcagactaactctcctggtgtatagtcaagactactttgtttacagatcacaaaaaccaatttaagctagcttaggtatacccatatacacacatcctaagtagaatttataagtatctggagcccaggtgtcctctggtcctaagtccagataagcagcctctgcttttaccctgtgctcatgtaacgttccagtaggttcattttgcctactgcccacatagagctgacttagcaagatggggaattgcagtagagaaagagcttaattaatgcagagccagctgaacaagagaccggggtcttattattactcaaatcagtctccctgagaatttggaggctagggcttttcaaggatagtttgggggaagaggggagtggttaggcaatggcacttgctgcagattggttggaaatgcaatcataggggtgtggaaaatggtcttcatacactctgagtcacttctgggcggggccacaggagtggttggtgggttcaggtggagccattagttatcagaaatgcaaaacaacctgaagacatctcaaagggccaatcataggttctacagtagtgatgttatctgtaggagtaaattggggaagttatgtatcttgcaagctccagaataatgactagtaatgagtaatatagcccattgttcctgaggtgtccaggatcccctttttaccctccaaagtgcctcatagataagcaattttgtttgggttaaatctttcccacggtggccactgtaactcttatttttggtaaggtttacccatttctctagaagagaataggttccaagatagaagacttgttgaatccagatgaacccactcttctctgtcttccttaatcttaccaacctactggacccagtccagcttctgcctgacccagtcagacatctgaggcctctaattggatgcaatcctattaattacaggatccaatctgatcttggacccagccaatataaaaattactcaaataaacttgaagagctcaaaacacaagttcatggagcttgaatcaaagagaactcacccatgatcccagttgctgtgagagatcaatgggcacagtggaccaggcaggtatatttacctggtcacttggtgcgcctgggagtcactggaagtctactttggatcccatttgtgataccaaagtgttaaaaactttaggcaagttaaattttgcagagtttatttgcactaagagctatttgtaaatctgtcatgggatctttggggtgttgctccaccagctggaaacctctgtggccagtggtgcctttgcccaagtttttactcaggcccactaggcttgttccacccattcagcctggcaggctgtgcttggctcatgctaccagcctgaatctcatacctgccaagggcaagccaggcatggagcagcgaggggtgtgtgagcaagtgattgtggggtggcagggtgggcagctccctgcgaggctgtggctggaccaggtgtacctcaagcagcttccacagctggcactggggaacatggtggcacctggaaacttggagatgccaggaactgcagacccccagagagggtatcacagccctgacttgagctcctaggtctgggctccccagagggctgcagctcttctctctcctctcctctctcctcaccttgttgtcacccacaacgtggtgaaaaaggagcatgtttcagccctgtgtgtgttacagctgttttagctctaccattcagtgggtcctgagtttttgtcctgcatcctggaagaatgaggtacacagacaagtggagggtgaacaaggtgaagaggagctttattgagtgacagaacagctcagaggagacctgcagtgggtagctcctctctgcagacagggtctcctgatgagtgtctggctctcagcagagaggaggccctggggtgggtagctcctctctgcagctggtcaactggtggcctccttgagtctgtccgagtccagggtttttatgggtttcagaggggaggaagtgtgtgctgattgattaatgggaggccactgacgggccagaaaaagcaccataagttcccattttggtcagcccagcccccaggcttcgggctccccctggcttgaaggtggggtttcactgaggacccacccctttccacacagaggcctgtctgcctccttctgtcatccagtggagcccaggctgtttgcactgaggggtgcctacaggccagtaccaagctgccctgagaaccccccttggactccctctcgtgcttgttagcacccaaactcgggagggggctgaggcagtgaggctggcatgtcagcactgcccatggtgtgtgcacacctggccgggttgcaacagtgcctgggctcagcctcaactttgctccaagatcagagcaggtgctggagcagagagaggctaggtagcaggagcaggcatttcgagctggtaggggcaaggggtttcccaggtctccaagagtgcagaaatgcctgggcccacagccgcagccagacggctgcaactgctcccaggagggcagggcccctgcctactcccagcccccaagagcacagggatgcctgggtctggagccacagctggatggccgcagctgcattcaaggagcaggaggctcttaccctgccaactcagaagcgggtggggcttccacctgttcccagctcccagggttccatggagtgtgcagccccgactgtactcaggtagcatgaaccaagcacagcctgccaggctgaatgagtgggacaagcctagtgggcctgactgcagccagcatcatggcagtggccactccagatgggccaccactgccatcaaatcgagcagccctcagaaccagaggagtttcagagagctgttcttcacaatgtggcaggcagtgtttatggatgaaaatggaagtgaactacagaaacagcttgactgattacggttcgggctttgcctcatttgaacatggtctaatcagttggccacttgtgactaactgaagcatagccgctatgattggctaagacttggctatttgtttaaaacaacaacaacaacaacaacaactcctaagataggttttcagttagtacgtactaagttaggttgcagttggttacatgaggactcaaaatacagaggtgtcctcaggccaaatgtactttaacaccatatctagtccagtcagctatggttgaagacagagttacgccatataaacaactgatgaagttctacctctgtggattaattatggtgatgggggatcttcccagagaaagagggtagtcattagcttaggacaggagaatcacagggaaaaactaaaatatcatctgactcatctcttaggcattagataaggtcatgcctacagtttttctttaattatcaatgatctctgggtcaattagtgaagctcataattcttgttcagagcctccttatcttccccctgttctctaccctcaagctccccctgtgggttactaacaatggggccaagttgggaaagggttgggagttgttcagagagctgcatggacgtagatctgagtgtatttcaaagacagcttcaatgcctagtttatagtagaaacctaaagatagtttataaagggcatcctgtgattttacatgggtctctgagacttaggtaggggagaggaggtctctgatactctttcttaaatggcttcagtgtcttttgatcggtccttttaacgtttcattgagcttcagtttccccatctgtaaaatggggatgatgagcataactcactgtattgctgcagtaatagatatgaaaatgttttgtgatcattaaccacccacactgtactgtctgtgcaagcgctttacaaatatgaacccatttaatgctcacagtagtcctgttaggaggtagtagtactcttattttacagatgaagaaacatggaaaataacttgtcatatagttaaattgagagtcaaggtttaaacccagacagagctcttagccatgcttacatgctgtgcctcccccgtaccttcttagaaggagcagtgttactctctccagatgtcagttctctatgtagtcctaagaggttcttgcagccctacccactaagttctttctgctgcttctgcttcttttagattgacgacactggcacatttcaagtaatagtggttccctccggggccgactacataccagcattagagagactccagcggtgcactttctgctatggtaagacccacagagagaaggtaatttggtcaggcctattaagcatgatgagtcaccactggcaggggcaactggaacttggcagcagggatacttatggccttgggaggacctctctggggttctgggcccaccctgtcacacttcatcttccacagatgaatcctctcagctcagcaaacatggtctcttcctatatatcccagcaaaagagttgcattccaggcctttctacatagtgcagcttacaggaaacagtaatgattcttagaaaaacagcctatttcattgccaagtttttatgctataaagtatatttatgtgttttctaaatctcaaatgttcacagccacaaagaaatgcctgaaagcaattcagcaccctcctacctgcttaggaatattttttagtacagtcaaagtggaaaatagcagaaattcatacatttctcattgaaaaaaggcttcatagactcccaaatattaagcatcagaaagatttgcagtgttgatttatttgtagtgttttatacgtaatgtataggtctaactagaaaactggactctaatcttccatttgagtgttctaataattacaaagacagtggaagccactggaatcattggtggctgtaatagctaagagatataaagcattttctataggccatgcactgttctaattcatgtaatatcaatgatggtgataatgacagttaatacttaaactattgtgcttatgttccaagcactgttttaataactttaaatgaattatgtcattcagtctttaaaatcaccctaaaacatttaaactactattagttccattttacagaagagaaaaataaagcttagagatagtaatttgctcagggcttcacagccatattaaacccaagaaggctgactctaaaccgtctgcagtttatgaaaaacaggtctcattcttctgctccctaaacctctccatttgagcctgtagaaaatgcttgatttttctccttcacatgtatcagtgagatgcaaatgcctgccatataaatgacctaaatgaggaaggtagtaattctgagggagaagtagggtttctggtcttctaataacccctcttctttctgtcttccctctgctcccctctatcaaatttccctctttccctctccttctcttgactgcacagaattggtttaggcgctggcaatcttactcagaacagttaaagtgctttacatactgtggggagatacattccaccctatgtattctcagttgctttttcaaacatgtcagttacaacagtgtgatggtatgttgcatagtcagaagttgcacatgtgtgactggggatagattttggcttcatttcttggcttaaacccttgttttgtctcttaggcatataataaaagagattttggctgttgtttcctgcaattaaaaatcctacaaaactgagcaaatgggcagcctgctgtccctgattttagaaactgctttgcacacaggtgactgttttatcatctgaccattatacaggaccataaaattttagttaacttcagtaagggaaccataacttatccaaagtcacatctttattgagtccatgaacaagactgtagtgagaattttcttacatctcctaggatcagcactctggttattaatctttcatctaagtttttatttgtggcctctgcctatatatccagtaccaactgtccatactcatgttactccatttttctttcttatctttggttattaaagaggctattttcatcctcaaccatcaactactattgaaaacccaggattacaaaatgtcagccctgaaaggggtctgtaggtgagcctggtcctaccacctaattttacagaactatgctgaactgaagcccagtggtgacttggctaggggcacacagcttgttactgaaacgagaccagaacccaagcatcccagctctcaggccaaggggcctccccactactataccacctggcctcatctctaacaataaaatactgacttcctatatagaaacttctagaaatactggtgtgtccttaggcaaaattattttactatcctggccacagtctcttctgtaaaattacaacattaaatgacctttaagaaccttccatttccatttttttattcctctgaatattcatggtggtcatattcaataaaatcccgtttttattactatgcattcttttattaaatgagatatgcatatttataaaatgacctcatttaggaaagtccattaatatctaatattcatttaacaaacatgtattcagttttcaactaatgagcactatggaaatgcaaagatgagctttgtccttaaggatcactcataggtagacactgagttataaacttatttaaattgaaataaaagatatattactttgttcacttttactttgtaagcacttcttcatagtagaatataagcgtagtgataatattgtcaatctagagggatgagtcactgttatgttgtgatacagtatacccttgcatgcacgaggccaatcgtccacttcaaatgacataaacttgagacacagccaagattaaacttctgttgaaaacagcctaatctttaaaagtctgatagcattagtaaatggagtccaagacacaagctgggtataaaatctgtacttttgggggacagatgcaaaccatgtactaggaaatcttcctgttactattaaagtatttagtcactattttaacatcaaagactatgcagtttccaaatgtcaaaatatttgacatgctatcttcccttttctatttctacttagtaacccagagtaacttttggttcacagatgtgtgcaagccagatgcttcttgtgaccaagccagaccaccccctgtgcagtcttacatggatgctgctttccttctggatgcctcccggaacatgggaagtgctgaatttgaagacataagagccttccttggagcactattagatcactttgaaatcaccccagagccggagacttctgtcactggagaccgggtggccctattgagccatgctccccccgacttcctacccaacactcagaagagtccagttagagctgagttcaatcttaccacctacagaagtaagcgcctcatgaagaggcatgtgcacgagtcagttaaacaactaaatggagatgcttttattggtcatgccttacagtggactctggacaatgtatttttaagtacacccaatctgagaagaaacaaagtcatatttgtgatatctgctggggaaaccagccacttagatggggaaatcttaaagaaggaatccttgcgagccaaatgtcagggatatgccttatttgtgttttcccttggccctatttgggatgacaaggaactggaggatctcgccagccaccctttggatcaccacctggtccagcttggccgaattcataaacctgaccacagttatggtgtgaagtttgtgaagtcctttataaactcaatcaggcgtaagtcataaaatctgttgttctctgcactttaagaatatacttggtattactaaaaaaaggttgatgagctaacatggatacttggaaacctcttgtctgtcttcaagggcacttcagggtcagaaaggaaaatatataatgacggatggtagaagggaggaaacctctgattcctacacatttagttttctggcttattttttttttatgcctctggttcctatagagaagcaatcataacaagcagctgttcacacatctgtcttcatggagcagtgcagtccgggggtgtgaagtcatagcctggactttagctacaaagtagaaatccttgcagtgtaaccttagcacactgccctttgatggaaagtttcatctgttaaggcaccaaaaaagagagccaaagaaaaattaaacagttcttggctttgctttcacaagttcctgaggcagagtttgaagtgttaggagataccattttacctgtcagaatgaaaaatagagccttgcaaaactttcttagccttgttaatggctctttttatgatgccagtaattagagtaactggtgcccataaaaaagaaacatgggctgcatttcttggagtaagtttgccttgaaaatatgcaatccattttgaatgcaacagggtggataaaaagctgtatcctaatatgattctgaagggtgaaaagcacttggtaggacttgcaaacgttttcatggtaaatgatcccttgcagtccagatacagaaaaatgaacacacaggcaaaagagtacccggtgtggttcaactgaggtcctgattgtgtctcaaatgtgcctctgatattacgtggcaagcccagttaaagctgtagagacacagacttatcagtcagtgtagggtgaggtctaaggagccttggagattgttgttggggctgatagtatatcctctatgattcaaactgactctagaaccagtagtaccagtgtcacttgggagcttgttagaaatgtagaatcttaggacccaacccagtcattctgaaccagaatctgcatattataaagatccccaggtgactcatatgtatattatggtttgagaaacacttggatgggaacaataagcccccagaatgaaatttatgtggatgtattctggaatagaagccagaaagaagagctgaggaaaaaaaggaaaaaaacggggatggggccattctgaagaaaggaatcataaggcatttgtaagggtaaaaaaagtacatctctaaagactgataacttgtaaagaaactctcatcaggcaagaagttgcaagaagtcttatgatggaatttccttccccactcccccaaaattcttggtagtgtttcatgggttattagtcaaattatattattagataaatggcaccaccccacccctcaactgaggaaaggtaaaaagatgttttaagaaaaaagtacttagggtacatgagagatacataaagtgctttgggaaaattataaccatgatgaaattatacaccattcttctagaacttagatctataaatcttcaatctttaaaatgtaactataaaagtacaagtcaagaaagactttgcataatcatgttcaagtctacatgcttaattccatagcaggctcacagacttgtactaacgcattcaacattaacatatatttactggggaacttctctgagccactcactgttctgatgctgggtatcaaggagtgaccaaaacagtcttggttactgactggtcttctggtctagctccctcgctttgtggctcttatttaaatatactgttataatagagttgactatcaagcacactccacatcaaaatcaacacattttctaagagaaacaaaactgctgacaaaccatctgatacttaacacagataaaaaaattaaaaatcaggtgcacaataacagaagcatcacacagtcttaggccattcagtccagagcacacagtcttacttagaacagcagctctggagacagtgttgggtcacggtccaggacaaacttgctacttatgatgaccctgggtgaccaggaagagatctagttgtgtttagcaaatctatttgatttactgcttcaaagaaatagataatacatttttaagaattcccatcaaaaatggcttttaaatctttacatggtataaaaagaggcatgcttcattgttatgaaaaattaatacacttccaaatgaaatgagccactaatgaactgaacccaagatgttagtgctattgttgctgttgttagtgtttcaaagatcataaagaaaatgtcttttttcctttgcattttgatatttcaaaggagcaaataaataactactcttgttagtttatatcaattaaaagccagacctattaggactggctcattgttatctcctctaatggttgacccgctttagcagctaagaggatcttactgaaaagttagttgaattcacctataaattcagaagggatgtgttttctaaagtcagttttaaagattcccctgagaaatctgctttcatttcatgtgatcaccttagttggtatttttcttgatggctatttaaaacagtaaagtggcactttgtgtacagagcagattgcagtaatgttaacagtcatgaatacaagacttatcacagacttttctcttctaggtgcaatcaacaaatatccaccaataaacttaaaaataaagtgcaacagacttaactctatagatccaaagcagcccccacgaccattccgaaggtactgtctgtttggtgttacttgataaatgagaatgccccctgcctttcttctattttcctcctcctccttttcttgcttttcttcctcctccatcttatttggacaaaaatctattgctacatgatattaaaatataattcgaaggaacaagagataactttttaaaatgaccatgctgatctgaaaaacaaattgcttttttttttaatggaaaagctaagtgttgaaataaaacacccaaatgggacaccccagtgacaatgagcatgcctgataaccacattgtggtttctaaatacctttaaaaggaaccagggtttcttagagaaagtcctaattctagattgccccagggaaggtacaatattagcctggagaaacttgttatgccagaaagcaagaaaataattaaaaaccaacaatgtcttttcaaaaggacaaaggagtcatcttgatgggattcccactggcctaattttgagtaagttgaacgttagaaagtataaagataatgaattataacactttgaatttttaaaatccgcaagtctatatagaggacttccaaaaatggaggaagagagaaaatgttctctatacaagaatgctagctaataaatgtagaaggaatggtagaattagaaaatcaccagtttgtggttcacaatgtaataacaatgttaataacatattacaataactgatgattacagggtgccaaaaccatcgcgtgacaggttgttggggaacaggctgtttaaatagtctcacagaaccactcacatgttacttattaattacaaacaggaaaatgtgcctttacgtggtgagatctggcattatgtgcctcctgaggggatgcagtgggaggtgcacaacgtcacctaaatgagcgtcttggtggacctcagataggatgtttaatccaagtctaataatgaggaaaccaatggacaattccagaatctagaatgtttttcagaacaccttgcctacattgtttataggattcatatcatgaagaatagagggacatggggtactgttctagaatgggagacaaatgagacaaaatggtcaaatgtaattgtgtgaatcttaattcgatccaagattggaaaaaagctaatataaatgatatttggggaacaatagggaaaatttgagtatgaacaatatgttggatgatattattgaattaatgtcagtatccttgtatgtggtagtagtatcatgtttttataagagaatgtctttgttgagataggtatgctgaagtacttaagagtaacatgtatgatggctgcaccctaccttcagatggttttcctaaagggaagtaggatagggtgtgtgcgtgaatgaatatatgtgtacattatatacatatatacatataaagaatagcaagatagtaacagttggagaatataggtgaaagatatacaggttatttatgattctgttcattctaattttctgtgaatttcacaattaaaacttgtaaaacttagtgaaagagtaaacagtaataaatgtgtctgaagagaaacataattacagaaaatgctgaaatagaatgcagagatgatcaagaattttagagacaaaatgaaatgggaagatctaacctatatctaattggaattctagaaagataaaatagaaataatgagagccaatattcaaagacataaagagattatcattttctagaacttatgaatgacatgaattcacagatgaagaaaaaagatataacaggcaagataaatagaaagcaacagttggacatagtatggggaaatgcaggacaccaagacaaaagcagccaaaaagaaagggcagattatctacaaataaattgtaattaggctggtaggtgatttatcaattgtaacagtggaaaccacaaaactattgaataactttagtggaagaaaattttgtcaacttagaaaaactgtcttaagacaatttagacttaaacaatagtttactacaaaaaagtctttattaaagaaacttctacagtatgtacttcaagaaaaataaaaaataaccacagaagaagggaatgagatgcaagaggcaatagtaagtgataaagtttatcagtatttagttaaatctaaacaaatgtttttttgtttgtgagacagagtttcactctgtcgcccaggctggcgtgcagtggcatgatctcagctcattgcaacttccacctcccaggttcaagcaattctcctgcctcagcctcccaagtagctgggattacaggtgtgcaccaccacgcctggctaattttttgtattttttaggatagatggggtttcaccatgttggccaggctggtcttgaactcctggcctcaggtgatccacccgcctcagcctcccaaagtgctaggattacaggcgtgagccaccgaacctggcctaaacaaatgcatttttaagtaatatatattaacttgtgggattataaaaaagctgtacttgttaacaaagctatgaaaataaaacatttcacctggtggttttaacagaaaaagttctaagactataaatattaataaatgtttttgatttatttaaatatgagaaaagacatcaacaaaaataatcttgtattattaaaaaatgaagccttggactttaaggaaagcaaggtggtactaaaaagagggtaataataatgtaagtcacagggagatagatggagttaaaagattctaggagcttgtatcatttgggccggggattaggctattgaaaaacttgagatgcttaaaaaatgcataacaaattttaagggcacacatgaaaaagaaaaatataaattagctaactaccaaaaatctagtgagggaaaataggataaaaaaacaacaatgtaataattattttttaaaaataaaaagccaagaaagtttctttaaaaaggccaaaaaaaaagacaagcagaaggcacaaagacagcagaatcaagtcaatttaaatatatgagtaatcacaaaaaaaacagattaaacatgccagttacaatcagagattgatggatttgattttgaaaacaaaataaaatccagcttcagctgggcgcggtggctcatgcctataatcccagcactttgggaggccgaggcaggtggatcacctgaggtcaggagttcgagaccagcctggccaacatggtgaaacctcatctctactaaaaatacaagaaattagctgggcgtggtggcgggcatctgtaatcccagctactcgggaggctgaggcaggagaatcgcttgaacccaggagacaggggttgcagtgagccaagatcacaccattgcactccagccttggggtcaagagcaaaactccatctcaaaaaaataaaatctagcttcaactgctttcaagacacacatccacaatataaggaaatggagaggcagaaagtaaaatgatggaaaaaacataccaggcaaatatatcaaaaataaaggtagaatagctatatttatatcagataatatatacttttaaatcattttgtagagataaagaggatgactacatgatgacaaagtgttcaatttatgaggaagataaaacaattttaaattgatgagggtcgtaaaaccttaaaatagacaaaagagaaactgaaaaaccataaggagaaattgtcattgaaccatcaaaattcgagatttcagtatactagtttgaatattgataggtcaaacagacaaaaattagtaatgatataaaagatgtaaacataagtaacaaatgatttaatagatacatgcagaaccctggacagaaaaattagacattcttctgaagaacatatggaatattaacaactgttaaatcaaggtggagtgtttataagtgttccttgtgcaacttctaacttataaagcaagtgtcaacaaatctctgagaactggtgtcatacaatccacattgtctgaccacaatgcaattaagttagaaattaataatattttaggctgggcacggtggctcacgcctctaatcccagcactctgggaggctgaggtgggtgaatcacctgaggtcaggagttcaaggccagcctggccaacatggcaaaaccccatctctactaaaaatacaaaaattagccaggcgtgatggcccacacctgtaatcccagctactcgggaggcagaggcaggaggattgctccaactcaggaggtagaggttgcagggagccaagatcatgccactgcactccagcctgggcaagagtgagactctgtctcaaaaaaatatatatataaataaaaataaaataatattttaaaaacctatacattttaaagggaataaataaataatgggacaaaaaattatagtgaaaacttaaaaatacttagaactgtgtaacaatcaaaatgctatatgtcaaaacttgtaggatgcaccagaagtcatgatttaggaaattttatcttaattctcatgtgagaaaagttatttaaattcaagaagctaatgagctaagcgttgatctgaagatgttatatatttgaaaaaacagactatgttcaaagaaatgaatgagtagaacttaatattttttaaaaattaagatagtatcaacaaaggcaaaagtcagttctttcaaaacttaagaatgtgcatatatattgtatctttagcacgtatgaatattactttttaaaaattagaaataagtgaaatcaaatgggagtgtctctatttctgtggtaaattattctgtacaaacacacatatacattacccagccaccaaccacaatcaaatgtgcaccagcacctggaacccacacttaggcaaatacctttggcgatgtgcctacttttattgtgtgatgtgtgcatttctgcatggtgatcaaggccagggaggcactcctaatgcagtagccccagctctgtcacctctgagaagcctccacctggaatctcttgcttaccttgacaggtgagctgtccagggaaactgtccagcagcaaataattcctgaagtcaagcctaaaacaggcctgtgaattaagtccaaggagagcagggctccccgtgctgcaggtgtctggcagcttggaaaagggacatagacaagatgccgtgcatgtgactcttgccgaggacagtatctttggcatggagggtacattaaagctggtgttaaagcagtgttttcaccaagtcaggctaagtgctacaagctggttagcttgcacagggcctgggtgctcagtagggcacagcacttggggtttagtgctctacagtcactattagtgttatttttgaatttgagttttatagtgaagtccaatgggataataaagcacgtgttggggagtcggaacctagagacttggttcacttgccagtcaacctccctccacttccccaggactggttctcatagaccactgtgtacctcccagttccctggggttcccccaccccacctaccctagactgggaggcttagggtcagttatgctcccacagtcttgggacagggaaggcagcggccatccaccccaagctggcagtgccacgctgcatttatcttttgcccacctacatcgaggcacccagcatgtcccagcaaagaggctgcaacactctagagcaagtctgtccaatctgtggcctacaggctgcatgaggctcaggacagctttgaatgtggcccaacacaaatttgcaaactttcttaaaacatgagattttggtgtgattttttgtttcaagctcatcagctatcgttagcgttggtatattttatgtgtggcccaagacaattcttccagtgtcgcccagggaagtcaagagactggacacccctctgctgtaggttgggatggccagccaagggaagaggggagatgcctggcttgacttctggctgttgggaaaaggaactcaacagctggccacacaccaagtaaaggggatggggaaagcttattgaatgacaaatagaaacctccatggcagatggagagatcgcagaaggaagaaagcttttttccctgcttttagacttaagggcctgaatttgcattttgccgtcggctctccacatatgtagccagccatgaatgctgcaaggacacatgtgggagccaacctatgcaattaaaaggcatttttgaaaaccactcctaccatgctttatgtttgcagagaaatatgagtgggaagaggggatccacagtgcttttggacaggaagtttcttcctctttcgtcacactgccccagattcactggatgctcagcttctcctatgtatttgaaatggtgaaatgtcagcaaatggctggggcatcaaggaattgagacatgaaatccataccactgtctgtgcattcgccagccattctataagtgatcaaagactctaatcaaaagttatgagccacacagctgcttctgaaactccttacctgagccattcaagagaggtgaggcacaattgaacacacaggattgagggagatgagaatacctgctaggaaagaggtctggatataaagatgactcatcaggtctttagaatgacttgcataggaattaggtcattctgtgagattatgagaaatacatgtagaagctggtgcttatcagatagaaaaggaaggagctgaatcaaaccacaagctaccaaggagacaggtggcccatgaggatgagagagcagggcaccctctttatataagcacttagatctactcagaaacaataaaggcagaaagccacctgtttattgcttcatccagccagggaagaacctgtgccagactttaaagcagtgataggccagagccagaacaattgaattgtaaaaatggacataatcactaatgccatatgaataatgcatctgttataattctgctttccaaagtacgttttctgggcacaccaaatgtaaaagaattctggaaatagaagcaatcttgtctgcattttctatttcagtgcatccagtcaactaatagatgtagcatggctgactcttgaatatctgcatagatggaggaatctgatcacagagaactacaattagtcccacctaaccttatctagaatttgtcacatccatctttccacaaactttactggagctgagcacaagttgcaaaatagacgatttcattctttgtcttgacaagctattggagttaccaatcagcaaagaattatttgaacaatatatagtaggataaagagaaacaaagtcttacaattctcaaattgagtaatcacattttttttttttttggagatggagtctcactctgtcacccaggctggagtgcagtggtgtgatctcagctcactgcaacctctgcctcccgggttcaagcgattctcctgcctcaacctcctgagtagctgggattacagatgtgtaccaccacacccggctaatttttgtatttttagcagagacaggggttttaccatgttggccaggctggtctcgaactcctgacctcaagtgatccaactgcctcagcctcccaaagtgctaggattacaggcgtgagccaccgcgcccggcccaaatgatttttattaagtgattattgccgggtgtggcggctcacacctgtaatcccagcactttgggaggctgagtcgggtggatcaggaggtcaagaaatcaaaaccatcctggccaacatggtgaaaccccatccctactaaaaatacaaaaattagctgggcgtggtggcacacacctgtagtcccagctacttgggaggctgaggcaggagaatcactcgaaacccgggggggcaaaggttgcagtaagccgggatcatgccactgcacctccagcctggcaacagagcaagacaccatctcaaaaaaaaaaaaaaaaaaattagttgggtgtggtggtgggtgcctgtaatcccagctactcacgaggctgaggtagaagaattgcttgaacccgggaggcagaggttgcagtgagccgagatcgtgccactgcactccagcctgggcgacagagcaagactctatctcaaaaaaaaaaaacaaaaaaacaaaaaaaacaaaaaaaacaaaaaaaaaaaacaaaacccaagtgcaaactcctacatataacatagtgaaaaacggaaattcaaagatatggtattaatgttcaaccttttgagaataaaaatatttgagaggggaaaaaatatagcaatatcatgctatataagcacttactaatttaacaattttttcgtaacaaagatgggaagaaaggtaacagtaactaaacctgccataaaagaaaacaaaggacctaacggaaaaggcggggaggtggggagaggtgcggggtagggggacgcagcgtgaaggggctagggaagagtccagtaaaggtaagaccatgaaaacagcgtgcttcagactcaaaagaatgcccttcccatatcagtggagccaatgttctatgcatacaatcgtcactttggggaatttgagtttataatgttcactctgcaagataataaggaaatgctgggatggtacatgggtggctaactcctgtaatccaagcactttgggaggccaaggcaagaagactgtttgaccccaggagttcaagaccagcttgggcaacatagtgagacctcagctctccaaaaataaaacaattagccaggtgtggaggcacatacctgtagtcccagccattcgggaggctgaggcaggaagatcacttgagcccaggagatctgggctgcagtaagctatgatggcaacactgcactccagcctgggagacagagtgagaccctgtctcaaataaatatatatacaactagtctaggggacttcagttgttgctcacaacaacagaagttatttttcattcccattttacacctgaagaaacaagggtcactctagttaaatgatttgcccaaagctgctcggctaggggctagaatattaaaatgtgaagaatgtgtttgaacccaaaactctttccacaacatccctgtaaaatacgattgtctgaaatggctccttttttgtactggccaatacagtagccaccagctatatgtggttaattaaaattaaatttcagttcctcagtcacactacatttcaagtgctcaaaagcctcatgtggctcatggctgccatataggtagtacagattctaggacacttctgtcagcagaggttttttcagacaggctctaagttctacttagcacttggcttctatgattccctgatttctcaacctgtcctgcaagcccttccagagtctgactccagctcctctttactgttgggttactcatgattcccagccaggctctttctgtgcctgccagactgggctctatttctatgtcccccattgtacctaacaccgtgccttctattaagcagatagtaaacatatggatggatggacctatggaagaaaggaagagatgaaataagggaatggcatacattcatgctttcattagacaaatacttattgagtgactgctatgtgttaagcacttttaggttcctgggattactatagtgaacagacaagatctcatgaaccttctgtctggttgggtggaaaagtgaggaacagatcataaggaagtttacaggtaaataaaagttcagatagtgccaagtgttataaagaaaatagcatgatgtgctgagggactgtaagtaggagtggatctgggaaaactatagatatggtggtctgtgatgaggtaccatttgaacccaaatctaaacaatcagaagaaccaaccataggtagaaatgagtggtacatattccatgaagaaactttgctgctgaagtaatacttttgcatactttgatgagatgtatcatttgtcagcttctgatatatgagccagtttaagtacccagtttaattttaaaattaccctggaggaaggctgcaacaaggaaatgggtgaaacaattaatttactatgacagattaatatgtagtctattaaagttgaaatggcatttatcttctatgatgttctcttttgttgtatagctttgttcctggaccacttaaagctaccctcaaagaagatgtattacagaaggcaaaattctttcaagataaaaaatatctttcaagagtagcaagaagtggcagagatgatgctattcaaaattttatgagaagcacctcccatacctttaagaatggaaggatgatagaaagtgctcccaaacaacatgattaaaaaaatgcttgaacaacttagccttaggaagcatggtaagactctggacttaaatagtaactaaatctgctgccagaactcaagcaacagtttgtaggttatcaggtgacttgaccccctgcattcattggtattaagatatatcttgttcatttatttgaccactcctgacaattccagcactctacgactgatatgtcgaagaactgtttcattagaagacagaagaatgaaagaagtgttttgaaaagtctaatggagatataatttgaaggtaaaatttatatgatgtatgcatatgtgtacatgggtcaatgttaattcttttatctctgtccagttcattttctgcaaacccatcctcctttcctaatttagtaatgtctaatgctcatctatttagtcaaagttattttttaatgttttaagctactccaaaatttatcctagaaatggatgctgtttatatgtcgtatttttttaaaacgtgaccttctattccacttaaacacaccactgtgggagttgtttgcttggactgatgagaagagggtaattttctccatctctaaatcctcctgaactcactgaaaaactcattaattcccgcagaacataaattattgcttttgagctggaagttttctcttcattaggaagcttactgccattttgatggagcttgaagcccccattttgatggacttctagtctgtctttcctgttatggtcatttattaattttcactaatccatatattctttagacaaggagagtcaagaaactacttgtcatagatgaagctctgagttacttttacccatcaggtagctgtttagtcaataataaacagcaccaaaacaggattagcagagctcttaaaaacagccttaaatacacactgagtttagaaaaatgtaagaaaatcattgttttaatctacaaattcatatgcagttgcagagatgcaaaagagatcagagtaagttaaagtaggaaaggttttataaaagtattgatggctgtgtcctcatctgcatttttgtttttatgatagggctgatattttcaacaacgaaacacccaatgttcagaccttacctcagtctaagagctggctccacagttggtagcaatggccctgttaggcagactgtccccctctttgggaatggaaagaagccctgcctggatgcatggagcagatggatactgacaccaaggacattcagattttctttcctatacctattttcataaaatttggaaagaaaaactatctgcagtatttttttaaaacgacttctgctattcttacttagagaaatccagtgatagcacctcatgtcttcagaggagcaagaagttcaaggagttaaatgtcacattcatactcaggtaatagagaagaataaaacacatcaggtttgcttcatctatcctaagtggtgcttaggggttcagaaaaaatgtttcaagtacaggaaattaatgagcaatatttacaatgtattttaataaaagggatttttctagttaactctgagttaagcacgaactcctttcttttgttaattgttggaaataccattaagatgtatttgtctgtttttctgcattggcaagtaaagaacataaaacaaatattcccttggtgacagattatttttagtattttgggccatcttttgaatcactaataggtgagagctctaaagcatgctgcaaatagaagttcctttttaaaaatccctaatattagtattttccctgatttacctctttctcctaaaagtggaaacagcaaaaattaagttgaatataaatttaataaagctatatttaacccaagaatcacacaagccaggatgcttcttggtttaaaaatgtgaattaatcgactgtaaaggaactgcctcccattatctctgcactgagctatgaatcaaactttttttttttaagtagaggtcaaaaggagatgcaacttaacacggcatcagattgtaatacttagaattcaaccaaataacttttttttaaaactggggcttttctgtggggcaaggggacagagaagaatgggtggtagcaggagataaggggagaaaaggatcatatctctgtcagcccactccatttttttttcttagcacttcccatatttatcagtcttacagcttatctatctaatggctccaggctgaagtccaatctcagcattacagtttatatagcaaaaaaaattttccccaacccccttggagactctaaatctgacttagtagctagaaaccctgtaaatatggtcttagcagacattaagggaaacaaagccaaggcaacatgacaatgccaaatttgcaatttctaccaatccactaagctatcaggcctagttagtccatcattcctaactttgacatttctgaacgactggcattttctgacagttttgttgtttacctgtctaaaaactaagtacagttggctctgtatctgtgggtgttccacatccatgaattcaaccgtggataaaaaatattcagaaaaagaaggatggttgtgtctgtactgaacatgtacagacatttttcttttcattctctaaacaatagagtataacaactatttagcatttacagtgtattatgtatcgcaagtgacctagaaataatttgaagtatatgagaagatgtgtgtagattatatgcaaatacaacgtcattttatgtaagagactagagcatctgtggg

SEQ ID NO: 14 - protein, 2263 aa, Homo sapiens
MMLLILFLVIICSHISVNQDSGPEYADVVFLVDSSDRLGSKSFPFVKMFITKMISSLPIEADKYRVALAQYSDKLHSEFHLSTFKGRSPMLNHLRKNFGFIGGSLQIGKALQEAHRTYFSAPANGRDKKQFPPILVVLASSESEDNVEEASKALRKDGVKIISVGVQKASEENLKAMATSQFHFNLRTVRDLSMFSQNMTHIIKDVIKYKEGAVDDIFVEACQGPSMADVVFLLDMSINGSEENFDYLKGFLEESVSALDIKENCMRVGLVAYSNETKVINSLSMGINKSEVLQHIQNLSPRTGKAYTGAAIKKLRKEVFSARNGSRKNQGVPQIAVLVTHRDSEDNVTKAAVNLRREGVTIFTLGIEGASDTQLEKIASHPAEQYVSKLKTFADLAAHNQTFLKKLRNQITHTVSVFSERTETLKSGCVDTEEADIYLLIDGSGSTQATDFHEMKTFLSEVVGMFNIAPHKVRVGAVQYADSWDLEFEINKYSNKQDLGKAIENIRQMGGNTNTGAALNFTLSLLQKAKKQRGNKVPCHLVVLTNGMSKDSILEPANRLREEHIRVYAIGIKEANQTQLREIAGEEKRVYYVHDFDALKDIRNQVVQEICTEEACKEMKADIMFLVDSSGSIGPENFSKMKTFMKNLVSKSQIGPDRVQIGVVQFSDINKEEFQLNRFMSQSDISNAIDQMAHIGQTTLTGSALSFVSQYFSPTKGARPNIRKFLILITDGEAQDIVKEPAVVLRQEGVIIYSVGVFGSNVTQLEEISGRPEMVFYVENFDILQRIEDDLVFGICSPREECKRIEVLDVVFVIDSSGSIDYDEYNIMKDFMIGLVKKADVGKNQVRFGALKYADDPEVLFYLDDFGTKLEVISVLQNDQAMGGSTYTAEALGFSDHMFTEARGSRLNKGVPQVLIVITDGESHDADKLNATAKALRDKGILVLAVGIDGANPVELLAMAGSSDKYFFVETFGGLKGIFSDVTASVCNSSKVDCEIDKVDLVFLMDGSTSIQPNDFKKMKEFLASVVQDFDVSLNRVRIGAAQFSDTYHPEFPLGTFIGEKEISFQIENIKQIFGNTHIGAALREVEHYFRPDMGSRINTGTPQVLLVLTDGQSQDEVAQAAEALRHRGIDIYSVGIGDVDDQQLIQITGTAEKKLTVHNFDELKKVNKRIVRNICTTAGESNCFVDVVVGFDVSTQEKGQTLLEGQPWMETYLQDILRAISSLNGVSCEVGTETQVSVAFQVTNAMEKYSPKFEIYSENILNSLKDITVKGPSLLNANLLDSLWDTFQNKSAARGKVVLLFSDGLDDDVEKLEQKSDELRKEGLNALITVALDGPADSSDLADLPYIEFGKGFEYRTQLSIGMRELGSRLSKQLVNVAERTCCCLFCKCIGGDGTMGDPGPPGKRGPPGFKGSEGYLGEEGIAGERGAPGPVGEQGTKGCYGTKGPKGNRGLNGQEGEVGENGIDGLNGEQGDNGLPGRKGEKGDEGSQGSPGKRGTPGDRGAKGLRGDPGAPGVDSSIEGPTGLKGERGRQGRRGWPGPPGTPGSRRKTAAHGRRGHTGPQGTAGIPGPDGLEGSLGLKGPQGPRGEAGVKGEKGGVGSKGPQGPPGPGGEAGNQGRLGSQGNKGEPGDLGEKGAVGFPGPRGLQGNDGSPGYGSVGRKGAKGQEGFPGESGPKGEIGDPGGPGETGLKGARGKMISAGLPGEMGSPGEPGPPGRKGVKGAKGLASFSTCELIQYVRDRSPGRHGKPECPVHPTELVFALDHSRDVTEQEFERMKEMMAFLVRDIKVRENSCPVGAHIAILSYNSHARHLVRFSDAYKKSQLLREIETIPYERSSASREIGRAMRFISRNVFKRTLPGAHTRKIATFFSSGQSADAHSITTAAMEFGALEIIPVVITFSNVPSVRRAFAIDDTGTFQVIVVPSGADYIPALERLQRCTFCYDVCKPDASCDQARPPPVQSYMDAAFLLDASRNMGSAEFEDIRAFLGALLDHFEITPEPETSVTGDRVALLSHAPPDFLPNTQKSPVRAEFNLTTYRSKRLMKRHVHESVKQLNGDAFIGHALQWTLDNVFLSTPNLRRNKVIFVISAGETSHLDGEILKKESLRAKCQGYALFVFSLGPIWDDKELEDLASHPLDHHLVQLGRIHKPDHSYGVKFVKSFINSIRRAINKYPPINLKIKCNRLNSIDPKQPPRPFRSFVPGPLKATLKEDVLQKAKFFQDKKYLSRVARSGRDDAIQNFMRSTSHTFKNGRMIESAPKQHD

SEQ ID NO: 15 - DNA, 26554 bp, Homo sapiens
  5'UTR (1)..(162)
  exon (163)..(244)
  exon (488)..(627)
  exon (3829)..(3958)
  exon (4805)..(4947)
  exon (5130)..(5271)
  exon (5477)..(5648)
  exon (6174)..(6359)
  exon (6528)..(6640)
  exon (6956)..(7101)
  exon (7356)..(7487)
  exon (7621)..(7854)
  exon (8316)..(8537)
  exon (8742)..(8930)
  exon (9136)..(9260)
  exon (9443)..(9573)
  exon (14079)..(14191)
  exon (14591)..(14835)
  exon (15059)..(15305)
  exon (15653)..(15751)
  exon (15923)..(16147)
  exon (16237)..(16419)
  exon (16619)..(16837)
  exon (17129)..(17296)
  exon (17856)..(18038)
  exon (18147)..(18251)
  exon (18895)..(19134)
  exon (19360)..(19441)
  exon (19990)..(20156)
  exon (20329)..(20493)
  exon (20667)..(20798)
  exon (21042)..(21243)
  exon (21653)..(21843)
  exon (21942)..(22082)
  exon (22308)..(22409)
  exon (22876)..(22972)
  exon (23522)..(23566)
  exon (23669)..(23838)
  exon (23933)..(24007)
  exon (24522)..(24734)
  exon (24913)..(25038)
  exon (25231)..(25386)
  exon (25483)..(25584)
  exon (25809)..(25903)
  exon (26027)..(26129)
  3'UTR (26130)..(26554)
gcgcgcccgaggctcctacgctgccgcgcccggcttctctccagcgccccgcgccgttagccacgtggaccgactccggcgcgccgtcctcacgtggttccagtggagtttgcagtccttcccgcttctccgtactcgcccccgcctctgagctcccttcccatggcggccctagtgttggaggacgggtcggtcctgcggggccagccctttggggccgccgtgtcgactgccggggaagtgggtaagcaagcccggttaggctgcagaccttatcccactctgtgatgcgcctctcctcccaaccttccccgtccagaccccgccattttcccgccagcgtacccccttcccccattcggtgcccatgggccccagcgccataaacccctcgcgaccaaggcagcctccactggggcgtgctcatcgcgcggggagtgttccgaagggtgccctaccggagcccagccctgcttctttcttgcagtgtttcaaaccggcatggtcggctaccccgaggccctcaccgatccctcctacaaggcacagatcttagtgctcacctatcctctgatcggcaactatggcatccccccagatgaaatggatgagttcggtctctgcaaggtagccacacccagtgctttctctacattccttttcaagtcagtaattgttaactattagtgaagtaggagacgttgacaccctgctgggcatcctgcagaaaacatacccactgaagtagtaaagtcaaggactaagatcactagtaactgtagttaggggttgttaagtgccttgggaggcacagagtgttggaggcctcaggaaaaagctaccgcctttgttaagggcatcaaggctccaggtatagctgaaagcattctgtatgtagtgaaggcatggatcaaggaaaagtaaaagaggtgtaagggaacagccttgtccaacttgttaggcatgcagaagtcaggagaaaaaagcctgcagataagttaaatccggtgggcatggagggacctgaagccaaagcagagtcagcttagtttggtaaaggatccattgaaggtttttttttagcagcagagtcagatgggagcagtgctttttaggactacataaattagtggaaagagactggaaactagggtcacatacttctctgtgacagtgagtgccagtttacctacaaaaccagtgacattatcttctagacctactgacatggcctcgtctgattctctgcttttcagttgtgttcttacctctaggtgagaaaactgagtttcttcctacagtgaggtttcccctattccttcacctctgaaatttggaaactaagttgccctctgacagttcaagcattaaaaaaaacccaacatatagtaattaaggtaatagaggaagtcaatctggcctagagtagtatctctcaaaatttgtttggcctcactgcaggtgtaagcctttaattcttaatttgccttcccagccaccctgacgctggggagagtgagctccggataaaggacgtacatgttgttcttcctggaaaagaatttctaggttcatcacaaacctacaaatacactgcattctagttgatagtgaattcttgtgaatttggttaacctttgtcagtcatcacctttgtcaactctagacacactgactaaattgagtttataaaactacaaaattgaggcctgattaggatcagggtgggaaaggcctcttggagccactcgcacatataaatggattactccacctggccagggagggttctgccaaactatccttcagatccctggacagtctcagaatgcaggttccttaaactgttcatcacccagctgaatgcagtttaaatatgctgatccctcccacataaactttctgtttctatgtagctattaaacgcttatctattgagtaacaagtttatggtttttgttttttttttggggacaaggtctcactttgtcacccaggctggagtgcagtggcataatcatggctcacttgcagcctctgccacctgagctcaagtagtcctcccacctcaaccccccaagtagctgggactacaggcacctgccgccatgcctggctactttttttgtattttttgtagagaccgggtattgtcacattgcccaggcttgtatgttatctttttttatttaatttttttttatttttattttgctttgaggtagagtttctttcttgttgctcaggttggagtgcaatgggcaaccttggctcactgcaacctccgcctcccgggttcaagctattctcccacctcagcctcccgagtagctgggattacaggcatgggctaccattcccagctaattttgtatttttagtagagacagggtttctccatgttggtcaggctggttttgaactcccgatcacaggtgatctgcccacctcggcctcccaaagcgctgggattacaggcgtgagccaccgcgcctggccttttcttttttaaataatcccaaatgaagtttgggaggcatgcttagtattgtgccctgaacctttgttttttatttggtaatggggtattttgtacctccctatcttactcagtttttaatcacactctataattaatatttatatgggtgttaccttgttttctagctccctaagtcagaaataaacatcatgaagacaggaacctcatctttttttgctcattgctcttttctcagcatcttttgcaatgcctgcacctcaataaatgtctgactgacaccatgtgccttgctcttgagttctctgtttcgtgacaaagacacaaatacatattcatcatatgacgtaaatagcaagagaggaaataaagtattaaaacagctctaagatggaggcacaagctgtattgggtgagtgggaggggcttcacagagaaaggatttgtgatttcagttttagataaaggaagaaagaggcggggcgcggtagctcatgacttgtaatcccagcactttggaaggctgaggtggggggatcgcttgagcccaggaagtttgagagcagcctggcaacatggtgagacgctgtcactacaaaaaattcaaaaaattagccaggtgtgatgatccacacctgtggtcccaactactcaggagtctgaggtgggagaatcacttgagcccaggagattgaggctgtagtgaaccgtgtatttgtgccactgtactctgcactccagcctggataacagcaagaccctgtctcaaaaaaaaaaaaaaggaatggctaggtgcgatggctcactcctgtaatcccagcactttgggaggctgaggtgggcagatcacaaggtcaggagatctgagaccatcctggctaacatggtgaaaccccgtctctactaaaaatacaaaaaattagccgggtgtggtggcgggcgcctgtagtcccagctactcgggaggctaaagcaagagaattgcttgaatccgggaggcagaggttgcagtgagcttagatgtcgccactgcattgcagcctgggtgacagagtgagactctgtctcaaaaaaaataaataataaataaataaaaaggaaaatgtcattttcagtgatcatcggggcaccctgggcctgtgggttgtgtttcgtataggagagagcgttgttggtaaatggaaatacctatgcaaaagcaccaaaagtttggtatattgaaggccattcaatgtggctgaatatagggtctgtggccacacaatcgggaaaatgctgcaaagaaataacttggcctgaggcttctcacaatctctttccatctacagtggtttgaatcctcgggcatccacgtagcagcactggtagtgggagagtgctgtcctactcccagccactggagtgccacccgcaccctgcatgagtggctgcagcagcatggcatccctggcttgcaaggtatggtggcaagcaggggcatatttgggcagagcacagcatgcctggatggaaagaatcaaggtttctgtaatctgctgggacctgactctaagattgtgatagttggaaggtttagattggagttgggctgggagaaagaattgaactatcactcagaaagaaaatttccaacacaggaaggaactcccaccttccataatcatcagcttagggctaatcttatttcatcaccaccactggattattttgatgcaaatctcagacatcatatcatttcatctacaaatagttcaatatctatgcaaaaggaatctttaaaaaacatgatcataataacgtcatacactaaaaaaattaataattccctaatacaagtgtccaggcaatgtttaaaatttcccaatttttttttttttttttttttttttttctgttcatttgaatcttgctctaaacagggttcacacattgcatttggttgataagtctcttaatctgtggaccttgtaacctatttgaaaacaggtcatttttcctgtatctagtatcccatagtctgcacttacttggttacactcctgtagtgttacttagcgtattctttttttccctttatattattttctataaatggatagatttagagttgttcaattcagatgtgatatttttggcaggaatacttcatggtagtatacttctgtcacaatggcccaggattttgatgcacatagaacagctgtgtgtgactggggctctggaatggaagtgcttctggaagtctaacctcacagatgactgagttgtaggaatgtgatccctaagactgtgctattttgacaggagtagacactcgggagctgaccaagaagttgcgggaacaggggtctctgctggggaagctggtccagaatggaacagaaccttcatccctgccattcttggaccccaatgcccgccccctggtaccagaggtctccattaaggtacagaggtagagtgggagagtgttgcaagctctagcacagtagttatattctgcccacaattggggggtgaacacaggagagaatcaaaggaggctttgaaggtaggagttggtgcaggcatatcttatacccactgagcacagctgccaactgttgccctttattcgtctatttctcagactccacgggtattcaatacagggggtgcccctcggatccttgctttggactgtggcctcaagtataatcagatccgatgcctctgccagcgtggggctgaggtcactgtggtaccctgggaccatgcactagacagccaaggtgagtagctggggcctgttcagggcctcagacaagcagcttgggtggaagatctatcccttggtccaattgctaaaagtcagtaggagttgcagtgaagaagatagacattgggacttaacactctcatgggctgggggggctgcaggtgtgtctcctgtaattgaaatactgattttgatgtcatcttttctgcccactccagagtatgagggtctcttcttaagtaatgggcctggtgaccctgcctcctatcccagtgtcgtatccacactgagccgtgttttatctgagcctaatccccgacctgtctttgggatctgcctgggacaccagctattggccttagccattggggccaagacttacaagatgaggtgggacttgtggggagcagaaggggcccatacttgtggcatgaggggtggggtgtctcaggaatgagaagagagttggtgtttattcgtgttgaaataggagcgggggggttgcaggtgaggtggctcccacctgtaatcccagcactttgggaggccaaggtgggcggatcactggaggtcaggagttcgagaccagcctggccaacatggtgaaactctgtctctactaaaaatacaaaagttggccagccatggtggcgtgcgcctgtaatcccagctactccagaggctgaggcaggagaatcgcttgaacctgggaggtggaggttgcagtgagcggagatcgtgccattgccctccagcccgggaaacagagggagactccgtctcaaaaaaaaaaaaaaaacaaaaaggaaacaggagtgaggctactgagaacaggagatcggtgagagctggggtaggttcagtagtgaagagagggtgagcagggcctgtgactcggcatgcttctacctccagatatgggaaccgaggccataaccagccctgcttgttggtgggctctgggcgctgctttctgacatcccagaaccatgggtttgctgtggagacagactcactgccagcagactgggctcctctcttcaccaacgccaatgatggttccaatgaaggcattgtgcacaacagcttgcctttcttcaggtgagcctggttgactgggtctgtgaaaatttgaagccctgtgggccttgatgatggaaaagtaaagcacggcagtggatccgagtcccctgtcccactacccacctcgaggctgccagtgtcatgccagggaccatgatggttttcatgatgcaatctcttcaatagtgtccagtttcacccagagcaccaagctggcccttcagatatggaactgcttttcgatatctttctggaaactgtgaaagaggccacagctgggaaccctgggggccagacaggtaagatcctgagtagaactgggttgtggacctaagaacagggttggctccaggatgggcataaggtggacatgccctgggcaactcctagatgtctaggaggttaagggtattggggatgggtggcaaccaacccaagataccgtttaagcttctgttgaaaggaactccagggtcctgggttctggtcctccctctgctcctcctgaggtgcataatttgctctggactcttctgaaagcgagggagctaatccagttgacctcttgggtccagctcagctctaacattctacgaccttctttgcttccacagttagagagcggctgactgagcgcctctgtccccctgggattcccactcccggctctggacttccaccaccacgaaaggttctgatcctgggctcagggggcctctccattggccaagctggagaatttgactactcgggctctcaggtgaggcatgttcctccccacccttctgggcgtgtgaccctcaagaatggaaagggtcttaaggagaagggctaaggttgcagggaggaaatgaaccagatttggggaatgtagagaaagatgtagtaagaaatagaagtcaattattaggggccaagagtacagggagggaaagaagaggagaatgctactctaaggctgtttgcaattttgcttcttcagcagaggctgagatgccattcttgtccttttaggcaattaaggccctgaaggaggaaaacatccagacgttgctgatcaaccccaatattgccacagtgcagacctcccaggggctggccgacaaggtctattttcttcccataacacctcattatgtaacccaggtatgactggggcaaggctggaatgaaaagaggactgggcaggggggcccagtggtcactgtgggttattaaactttgattgcctctctacccacaaggttctgatgcctgtaactcccctctccatcctcaggtgatacgtaatgaacgccccgatggtgtgttactgacttttgggggccagactgctctgaactgtggtgtggagctgaccaaggccggggtgctggctcggtatggggtccgggtcctgggcacaccagtggagaccattgagctgaccgaggatcgacgggcctttgctgccagaatggcagagatcggagagcatgtggccccgagcgaggcagcaaattctcttgaacaggttggaggggtgtttgggtaaaggaagaatggtggtgttttttttggtagtgttattttcttttttttttttttttttttgagacggagtttcgctcttgttgcgcaggctggagtacagtggcgtgatctcggctcatcataacctccacctcccagattcaagcgactctcctgcctcagcttcctgagtagctgggattactggcatgcgccaccatgcccagctaattttgtatttttagtagagacggggtttctccatgttggtcaggctgatctcgaactcctgacctcaggtgatccacccccccgaccctcggcctcccaaattgctggggttacaggcgtgagccactatgcccagccatgttattttctttatatctttttttatgtgggacaggcacaccttggacagtaggaaataacctgtttgttcatctcttccactcattgcaggcccaggcagccgctgaacggctggggtaccctgtgctagtgcgtgcagcctttgccctgggtggcctgggctctggctttgcctctaacagggaggagctctctgctctcgtggccccagcttttgcccataccagccaagtgctagtagacaagtctctgaagggatggaaggagattgagtacgaggtggtgagagacgcctatggcaactgtgtcacggtgagtgaatgggggaagggtgggcgtcgtgtcaggcaggatgagcttttggaagagcagaggcccaggccaaggtctttgagagttgtatgtccctcagacccaggttaggtgcagccccagaggtaacaggaccctggggtgcagccttctgcctctcctgactctgcttggcagtgacctccatggcaccccccttcacaggtgtgtaacatggagaacttggacccactgggcatccacactggtgagtccatagtggtggcccctagccagacactgaatgacagggagtatcagctcctgaggcagacagctatcaaggtgacccagcacctgggaattgttggggagtgcaatgtgcagtatgccttgaaccctgagtctgagcaggtaagctctaggccctggaactgatagtctagttgttaccccctcttcttgtataatttttggcccttgaggttgaggtcttttgggcttacagtccctggagtacaagctggaatcttctttactaggttacttttctctcctttctgagacctctcctagacagggtcttctaggccagtgactttattctccttctttgcagtattacatcattgaagtgaatgccaggctctctcgcagctctgccctggccagtaaggccacaggttatccactggcttatgtggcagccaagctagcattgggcatccctttgcctgagctcaggtacgaggatgagggagatatcacagtggggaagtgggtcgggggctgaggaaaatattgatgggacagggaatatgaaaaggacattggcctggatttgtgggaatggaaagagctatccggaagctcaccctttatgcttccttcactgtccttctggcatcccacctgctggaccccaggaactctgtgacagggggtacagcagcctttgaacccagcgtggattattgtgtggtgaagattcctcgatgggaccttagcaagttcctgcgagtcagcacaaagattgggagctgcatgaagagcgttggtgagactcatgccctgggcacccccatggggccccaccatgaccaagaatcttaaatgtcaagagttccctggcatggccttttacgtcctatgggagcaggtgcttgagacatttcaaactaagattatagtccttgtcaggagttggggaggcatctggaaatctgtgttggaatacagaatctctgggataggtgcaagccatcagactatctcatctcatttttgcagtatctcctcctctggcactttgtgctttggtcactaaatgacctttttttttagtatgatgtttacatcagagcagggcatcataaacctttttggtaacaaggaaatttattagtgaatgatgaatggccgtaacgttacccagcagtggcagagcatgttagaattgagttagtatgtttctttgtggtatccctttagttgccgaagaccgtcctctaacacatttcaaccaaaacaaaaatatacgtgtaccagacacagcgccaccagcctgatggataagagcattttgtggtgctccagatttccatttagagcagtagtggcctttaaacaagtaagtctaagctcagatattatttcagaatttttagaaattctgcaagactgccaattttttccttctggagatgaatctctgttatatgaaaattagaataaacatgggaatgaagccataattaaattgtggcaaaaagaagtggattgaaaataggccaatgaaagattggttcctagatgagacatttaattgttttacatctgttcaagtattcttggaatgtggtcttctttggtaactttttgtaacttttattatacaagtaagaaacatgaatcatggaaaacgaggaaagatagtttaaccaaagaacagtagtcacctgtaatcttgccttacagagattgattaattcgaccgtgtatctgcgactgcataattcagccgtgtatctacgactgcatacatttctaggcatatgtgtatgcatgtattaggcttctccttttttaacaaatctcaaaataaaaagtcttacaaccacagttacaaagaaattgaacaaaatcagtcacactactgttaacatcgtagtgtttttaaaacttttttaaagaaatgtaaatgttaggattgtaaatagaaaaatacacttggtaagaaatacttaagcccctagagtaaatagtcagaggagatgaacaacactttacagaagaagaaatcaataagcaaacctagagaaaagacggttcctctcattagtaaatagaaatctagttaaatgagactctgtttatgcccacttcttagaaggttgcttaaactttgtattatgaagcacagacttctataaagttattcgtactcatcaagggctataaaatttgtgttacctattgcctctacatatctggaaatttatcctaaggagattatccaaaacagaaaacatcatatccagtccaggcacggtggttgtaattaatcccagcactttggaaagctcaggtgggaggatcgcttgagcccacgagttcaaggttgcagtgagctgtgattgtaccactgcattccagtctgggtgccaggctaagaccctgtcttttttgtttgtttgtttgtttgagacggattttcattcttgttgcccaggctggagtgcaatggtgtgatctcggctcaccacaatctctgcctcctgggttcaagtgattctcctgtctcagcctccagagtaactgggattacaggcatgtgccatcacgcctggctaattttgtattttaatagagacagggtttctccctgttggtcaggctggtcttgaacgcccgtgctcaggtgatccacccacctttggcctcccaaagtgctgggattacaggccactgtgcctggccgagaccctgtctcttttttcttttcttttttttttttctttttttttttttttgaggcagagtcttcctctgtcgccaggctggagtgcagtggtgctatctcggctcactgcaacctctgcctcccaggttcaagcgattcacctgcctcagcctcctgagtagctgggactacaggcgcgcacaaccacgcccagctaatttttgtatttttagtagagacgggggtttcatcatactgcttaggatggtctcgatctcttaacctcgtgatccgcctgcctcggcctcccaaagtgctgggattacaggcatgagtcaccatgcccggccgaccctgtctcgttaaaaaagaaagaaaacatcacagcctaacttataattatgaaaacttttttttttaatacggagttttattctgtcacccagggtggagtgcaatggtgtgacttagctcactgcagcttggatcttctaggcttaagtaatctcccaccccatccttctgaggagtgagactacaggtgtacaccaccacaccttgctaatttttttttttaattattatttgtagagagggaggtctcactatgttgtgccggctggtctcaatctgccttaggtgatccttctgcctcagccttccaaagtgttggattacaggtgagagccaccaggactgcctaattgtaaacacttaaaagcgaaatgggccgggcgcggtggctcatgcctgtaatcccagcacattgggagggtgaggtgggcatatcatgaggtcaggagtttgagactagcctggccaatatggtgaaaccccatctctagaaaatatacaaaaattagctaggcatggtggcacgcacctgtagtcccagctactcaggaggctgaggcaggagaatcgcttgacctcaggaagcagaggttgcagtgagctgagattgcaccactgactccagcctgggcaacacagtgagactacgtctcagaaaaaaaaaaaaaaaaaaagctaaatgtccttcagttagtagttaaattatggcagatcatacaagaattaagttagttggttgggcgcagtggcacacgcctgtaatcccagcactttgggaggccgaggcaggtggatcacctgaggttgggagttcgagaccagcctggccaacatggtgaaaccccgtctctactaaaaatacaaaaattacccaggcatggtggcaggtgcctgtaatcccagctacttgggaggctgaggcaggagaatcacttgaacccaggaggcacaggttacactgagctgagatcatgccattgcagtccagcgtgggtgatgagagaaactccgtctcaagaaagaattaagttggtgttgatgaggccatgtggcaatgtgggaaaatgtatgatgaggaaaaaacacaggatggaaattatatgtatgctgtgatgatatgtaaaacatacctatgaagggcccggcacggtggctcacgcctgtaaccccagcactttgggaggccgaggcgggtggatcacggggtcaggagtttgagaccagcttggccaacatggtgaaatcccgtctctaattagccagacatggtgacacgcacctgtaatcacagctactcaggaggctgaggcaggagaatctcttgaacccaggaagcagaggttgcagtgagtcgagaccgtgccattgcattccagcctgggcaacaagagcgaaagtccatctaaaaaaaaaaaacctatgaacctatgaagaaaagtccagaaagagaaactctaaaatgattgttgtaaatgtgatttgctctgcatggatgagtagtaaggatcatcttcctattatctacacttttttaaaaagttttaaagaattccagttggtgttatgattatgtgaataaatcaaacccaataactggacagccatcagtggtttgggccactgtgataaacttccagtatccagtgtatggggatatattccagtatccccatgcccgttttaggcatattgattccatattcatcaataagcacaaagcctgagcttatccatgaaaatagcagggaaaagagctataagttaagatttctttttgtttgtttgtttgttttgttttgtttgagacggagtctcgctttgttccccgggctggagtgcaatggtgtgatcgctgctcactgcaagctccacctcccgggttcacgccattttcctgcctcagcctctggagtagctggggctacaggcgcccgccaccactcccggctaatttttttgtatttttagtagagacggggtttcaccatgttagccaggatggtctcgatctcctgacctcgtgatccttccgcctcagcctcccaaagtgctgggattacaggcgtgagccactgcgcccggccattaagatttcttagttgtgaaacaccatgaatcccaccatcatgtgacttgccttgagaatctcccagagtcttgactataaaccataagcattatgggcagtgccttcttcccaccccttccacctccacaccttcattccttccattctgttcttccaggtgaagtcatgggcattgggcgttcatttgaggaggccttccagaaggccctgcgcatggtggatgagaactgtgtgggctttgatcacacagtgaaaccagtcagcgatatggtaagtagctcccctcccctggcaatacccctaaaatagaccctgcttctcatcgcccccagaccatgagcttgttaccagtaacactagcagcagtcatcattggacatttgctttgtttccactttgctgagaattttgagatgtctcattagcacgcaagggtgtattactagacttgtttttacagatgaggaaactgagacataggttatagaaattactcaaagccacatagccaatgagaggtagacccaggattggtatccaggtttttgcagttacacagcctgtgctctggtgtacagtttccccttcctgagacaagagcagctacttacgctcaggcttttagatgggctggcagtagcttccgtctgtctaccccctttctatcaggagttggagactccaacagataagcggatttttgtggtggcagctgctttgtgggctggttattcagtggaccgcctgtatgagctcacacgcatcgaccgctggttcctgcaccgaatgaagcgtatcatcgcacatgcccagctgctagaacaacaccgtggacagcctttgccgccagacctgctgcaacaggccaagtgtcttggcttctcagacaaacagattgcccttgcagttctgaggtcagaggtggcaatgagagcttccggctgggaaatgtggggcagaacctttgtatcagtgagggacccttgggagggaggaaggagagtgtgggagagctttagaggcttctgaccttggttccaaggatatttcctctcatctgtgccctggggtctcaaccctctatcagtctgtaccctactctctgggcctgtgtttcagaccctttttctattttagcacagagctggctgttcgcaagctgcgtcaggaactggggatctgtccagcagtgaaacagattgacacagttgcagctgagtggccagcccagacaaattacctatacctaacgtattggggcaccacccatgacctcacctttcgaacacctcatgtcctagtccttggctctggcgtctaccgtattggctctagcgttgaatttgactggtgtgctgtaggctgcatccagcagctccgaaaggtcagagagttcattttctttccactttccttgctattctgttcatctctagcaattgcttggcactaatcctggcatttcctattaattgccgtcccttactttggtcatagagctttggggtgggggtccttttaggccatctctcatgccccacacggtatatgaatctcttccccaacactttgtacctccttccctcccaaggcaggggtcctgtacagctctttcagaggaagctgtgctggcagtctctgaagtaggggctttggcttagtttctccacgattttctccacgattttcctcccacctgactgctaagtacccttcccctccctcttgcagatgggatataagaccatcatggtgaactataacccagagacagtcagcaccgactatgacatgtgtgatcgactctactttgatgagatctcttttgaggtgagggagatggaggcttcctggtagcttgagtggccagggtcgagtagaacagctggctgacctaagattctttgaaacttggtggcggctgagggaagcagtgagcaggaaggctcagattcctgccctcttttgctgccaccacttgtttctccccctgcaacgtaggtggtgatggacatctatgagctcgagaaccctgaaggtgtgatcctatccatgggtggacagctgcccaacaacatggccatggcgttgcatcggcagcagtgccgggtgctgggcacctcccctgaagccattgactcggctgagaaccgtttcaagttttcccggctccttgacaccattggtatcagccagcctcagtggagggagctcagtgacctcgaggtgggctgggacctggtgggttacccggaggctggatgatgcttgggggaaagtgtgaacaactcagctaagctccctgcctcctgtagtctgctcgccaattctgccagaccgtggggtacccctgtgtggtgcgcccctcctatgtgctgagcggtgctgctatgaatgtggcctacacggatggagacctggagcgcttcctgagcagcgcagcagccgtctccaaagagcatcccgtggtcatctccaagttcatccaggaggctaaggtgggaggctgcagacagtgaagtctctgagggcatgctgccagccctggaggagacttccttctctggtccagcagaatcataggcaccagggctgggaacagtgggctatgtggggctcgttaaaggaagagacaatcctagagtaagtgagagaagaaagtggccctatgtcccactgtctgtgtccccccgctaggagattgacgtggatgccgtggcctctgatggtgtggtggcagccatcgccatctctgagcatgtggagaatgcaggtgtgcattcaggtgatgcgacgctggtgacccccccacaagatatcactgccaaaaccctggagcggatcaaagccattgtgcatgctgtgggccaggagctacaggtcacaggacccttcaatctgcagctcattgccaaggtaataaggctaaaggaaagaactaaagggccacagctcttgcatgttctgtgctggccacagtgccatgaagccctgcactgtctcctgccttcatccaagtaggcagggaagctggagggaaagggctgtagctagagctcatggtgttggggcttatgacagtcagtgaccctgaaccctgctcagtctgatcccccagagctgaggacggagaggaagagtctaggcctatagatagtgtcagcaaggccaacctgcagaaggcctgaccagtcttctctgccccaggatgaccagctgaaagttattgaatgcaacgtacgtgtctctcgctccttccccttcgtttccaagacactgggtgtggacctagtagccttggccacgcgggtcatcatgggggaagaagtggaacctgtggggctaatgactggttctggagtcgtgggagtaaaggtaaggaatatcgaaacccttggggttagcagaaaaatagcgggagagagttcactcaccacacagagttgtcagtatgtaaaccaggcactgactgcaaggcattgccggatcgtgggggtaatgaggtggtcattgtcccttaagagcttactttatggtaatgggagggaagagaagttggatccccaaaaaagctttggtatagaacagtccgtggtaaaactacatattcgacctgtaaacagaatgctgcaggagttcaagagacaggaggtgctgcttccaaaaggggtgatctgggaaggcttgagcgaaggggtgctatttgaattgagttttgaaggatggttaaggttttttatttgcaagggcacatcctaagcagaagctgagggatgaccccaagtacgtttggaaagcaggagggcacacagagagggcaggctgaccctgccattcagatgggatcaagcacagggtactgtgtccgtctctgctggtgagggaggaggtcctctcacaccttggccctctctcttccctcccgcccctttaggtgcctcagttctccttctcccgcttggcgggtgctgacgtggtgttgggtgtggaaatgaccagtactggggaggtggccggctttggggagagccgctgtgaggcatacctcaaggccatgctaagcactggctttaagatccccaagaagaatatcctgctgaccattggcagctataaggtatcagaatccaggagggcttcccgagggccgtggctccctgggccagggctgaccttgaaatggaagacaggaagaaaacaatttcatccttctgtttggtttcagaacaaaagcgagctgctcccaactgtgcggctactggagagcctgggctacagcctctatgccagtctcggcacagctgacttctacactgagcatggcgtcaaggtgcaggaactctggcaacctaccccactgctgcccttccccaagggggtgaaaatactgcaccaaagaattatctgggctgggcacggtggcatatacctgtagtcccagatactcaggaggctaaggcaggagaatctcttgagcccaggaggtagaggctgcagtgagctgcgagtgtgcagtgagtgcaccactgcactccagcttgggaaacagtgagatgctgtctcaaaaaaaaaaaaaacaaagaattatctcctattcccctgcttttattattaccattatactagtaagctatattccatgcagaaagcagaatacacaggaagcaaagagaaaagtctcttaaaatctctgtaccactgttctgatatttttccttccaggattttctctgtgtacatgtgtgtgagctcatactgcacctagtccttggtaacccatcttacttagtgtagatatctttcctgccaagaaatacactttgccagtatcaaatagaggcagccctcagtgcccaccctatgggtcctcagtctcctcatcatgggctcctgggccagctcctctcccttaaggctagccttcctgaccgctgccagacagcttggccctgaccttgactccgggttggcaggtaacagctgtggactggcactttgaggaggctgtggatggtgagtgcccaccacagcggagcatcctggagcagctagctgagaaaaactttgagctggtgattaacctgtcaatgcgtggagctgggggccggcgtctctcttcctttgtcaccaagggctaccgcacccgacgcttggccgctgacttctccgtgcccctaatcatcgatatcaagtgcaccaaactctttgtggaggtaactgagacccatgtgctgggagggagactgccagtgttgatgggaagaagaaagagggaggagtgagtatggaacagccatgctagtaataaagctttgtggctacagagggagagatggtgggtatagagtgtgcagagcctggtttatgggaaaaccacatctctccctacaactcccaggatcacccttcccttaaagctgactgctttccacttgcaggccctaggccagatcgggccagcccctcctttgaaggtgcatgttgactgtatgacctcccaaaagcttgtgcgactgccgggtaagtctttggggagaacttggcttctgaacactggcagcccctggcatagagacctgcagtgtggtgaaggatggctggggggcccactctttgtcctggactgcacagactgtgaagaccccagaatgtttctcactctttcattccttaatccacagtgtccacagtggccttgtctgaggaattttttttttttttttttttttgagacagagtcttactccatcgcccaggttggagtgcagtggtgtgtgatatcggctcactgcaacctccgcctcccaggttcaagcgattttcctgcctcagcctcccaagtagctgggattacaggtgtgtgctaccacaccaggctaatttttgtgtttttagtagagacggggtttcaccatgttggtcaggttggtctcgaactcctgatctcaggtgatctgcccacctcggcctcccaaagtgctaggattacaggcgtgagccaccatgtccagctcacccttcctatttctgaatcttcctgtaatcttgctgcttccattttctcccaggattgattgatgtccatgtgcacctgcgggaaccaggtgggacacataaggaggactttgcttcaggcacagccgctgccctggctgggggtatcaccatggtgtgtgccatgcctaatacccggccccccatcattgacgcccctgctctggccctggcccagaaggtgagccactgcactcttcctggtattggagacccatatgcccctaccagccacccttgcttccctgagcccttttccttctgccccgccctatgggcccaggccactggtgccaggctagcctgtgtgggcatgggtgccagtgagccttacctctgtgtatcctctccagctggcagaggctggcgcccggtgcgactttgcgctattccttggggcctcgtctgaaaatgcaggaaccttgggcaccgtggccgggtctgcagccgggctgaagctttacctcaatgagaccttctctgagctgcggctggacagcgtggtccagtggatggaggtagggagtgtgcatgtggcaggaggccaccacccagtgtctcctggcttgtgggcccctgcctaagtgggctggtagcagtgaggattcaggggagctcctggggactctgggctctgatgagcacagtcagagattctgcacactccttcatcagttctttctgctcccagcatttcgagacatggccctcccacctccccattgtggctcacgcagagcagcaaaccgtggctgctgtcctcatggtggctcagctcactcagcgctcagtgcacatatgtcacgtggcacggaaggaggaggtaagagtacacctgagatcctgctgtccctgttgctttcccagtaacaccaaaggtcagggtagtccttaggggcaggagacagcaggaggagagtctggagacagcaggaggagggtctcgagccagcacccttgcaggtctacatcatcattttttgagcagggatgttggccattgggactttgtgtagggcaaggcatatgggtggtgcctcttctggatcttcccattgttccccagatcctgctaattaaagctgcaaaggcacggggcttgccagtgacctgcgaggtggctccccaccacctgttcctaagccatgatgacctggagcgcctggggcctgggaagggggaggtccggcctgagcttggctcccgccaggatgtggaagccctgtgggagaacatggctgtcatcgactgctttgcctcagaccatggtgagagaatccagcatgtacctcctctgcccagtggggcttgtgggacagccctagcaagaaaatgggaagcaggccaggcctcaggactctactaggacagggtcttgatccgtatgggaccctagcctctagggtacctggtctgtgataggtgcctgataaatacttgttgaaagaatgaatgagccagtgagtagaactgcaagtgaaagaatacatgggtaaaagtgtgggctccagaagatggcagcagtcctgttgcccttgtttctagttcccagaaaaaatgagcattgggagtggtagtgagcataaggaggttgttggaagtgcagtcctggggtgtgagtgacttcctagacatggaggtgattggtcctgagggtaatggctttctttctcccagctccccataccttggaggagaagtgtgggtccaggcccccacctgggttcccagggttagagaccatgctgccactactcctgacggctgtaagcgagggccggctcagcctggacgacctgctgcagcgattgcaccacaatcctcggcgcatctttcacctgcccccgcaggaggacacctatgtggaggtgtggggatgaggcccagagcaggaggggggctctccagccctaggatatgttctctggggatcctttccctagcataacccatgtcctctgggcaggtggatctggagcatgagtggacaattcccagccacatgcccttctccaaggcccactggacaccttttgaagggcagaaagtgaagggcaccgtccgccgtgtggtcctgcgaggggaggttgcctatatcgatgggcaggtacgcaagtagcccctgcctgatctcagtagtgccctcttctgcaccacgttcatttcttcccttcccagcacatctacactgtcccactatgtgcaccactgccctggaccaggggttgggggcacagctcccccaaggtgctttttgtccttgctgacatctacccctttaggacctgagttctctctgctccctcctgagtgccctgccttctgcctgcaggttctggtacccccgggctatggacaggatgtacggaagtggccacagggggctgttcctcagctcccaccctcagcccctgccactagtgagatgaccacggtatccacactactgggctagggggctgggaggtgttagtctcagggcaggatgaacagcttgaacattttcattggtggttcaggaacaattggggttttcttgagggactgaatttgaagtggggttgggtcaattatttttttaaaatgctgggccaggccagatgtggtggctcacacttgtaatcccagcactttgggaggccaaggcaggcggatcatctgaggtcaggagtttaagaccagcctagccaacatggtgaaaccccatctctactaaaaataaaaaaattagccaggcgtggtggtgcacatctgtaatcccagctacttgggaggctgaggcaggagaattgcttgaacccagaaggtcacgccactgcactccagcctgagcgacagaacgagactccgtctcaaaagaaaaaaaaaaaaacaactctgggccaacgttatccctccagacacctgaaagaccccgccgtggcatcccagggcttcctgatggccgcttccatctgccgccccgaatccatcgagcctccgacccaggtttgccaggtaagagtggggttcctgtgactcagagactgtgtagggacaggatccacttcttcccagtgcctcgcctttctctacttacatgtcctcctctccatccctttatcctcgtctgatctgccgtgccatcctttgcctaaacaagtctccccggtgtgagtagacatctcacagcttctcacatgcccttttttgttgtgggcagctgtgttcctccgcccaggagctgggatcccacggggcagcagagcgtggggtaaatccaggttgttggttggtgtgagtctggccgttcctcttgcctaggatgcctttgccaactgggagagccccgggagggcaccactgctcccatacaacacagccccatgggaagccacctgtctgtccccagagctgctgcagtcccctgccctcccctaacctgctatattactgtgttgtgaattggtttaacatatacactgtgattcagagttcctgggaatatggggtttctttccaaacctcagccataaatgtatatctgtcctcttgtcctgtttgcagctgaggagccaaaggagaagtcctctcggaaggtagccgagccaggtgagactccaccctgacacacactcacctcggggacctctgatctggccttggtaggaggaaccctctgaccagccttttctgccccatccctcactgcagagctgatgggaacccctgatggcacctgctaccctccaccaccagtaccgagacaggcatctccccagaacctggggacccctggcttgctgcacccccagacctcacccctgctgcactcattagtgggccaacatatcctgtccgtccagcagttcaccaaggatcaggtgcctggggcagggaggatgggaccacccagagctttgaggatttggaaagctggggctaggacctttctagctaacttgggctctttcttagatgtctcacctgttcaatgtggcacacacactgcgtatgatggtgcagaaggagcggagcctcgacatcctgaaggtcaggatcagggccgggggtagggtccaggccatcgcctgcccttgggccgcatcagcgcagggccgcgcagtggtcagagtgggtcttcctccccctgccatcccgtccccttatgctagtccatccctctgctgctgtagatcttcccccacgttttccctccccaaagcaggatttagctggctggggaggccctgagcatgagaccatcgccccactagtggggtcttctggtctgggctgctgcaatcatgggagagagctagggtgtgtcctcctttcccagctcgttcagacacttaatgatgggtggttttctggaggcagagcctttagctcagagtgacaccagtggtggaaacgtcaaggctctgacaggtcacaggggaggtttgggtgcagaagggtcctcacagcacccctcaagtgtcagttggggtggtggtgcctagctggggtttccccagggtggacacgcatacgtacaccttccatcttgctctttccctaggggaaggtcatggcctccatgttctatgaagtgagcacacggaccagcagctcctttgcagcagccatggcccggctgggaggtgctgtgctcagcttctcggaagccacatcgtccgtccagaagggcgaatccctggctgactccgtgcagaccatgagctgctatgccgacgtcgtcgtgctccggcacccccagcctggagcagtggaggtgaggccagcctgggtactgagatggggttaagaaggctggacccaggggcatgagaacccttctgcccacgttttctgtgttttgggccagatgagtgaggggaccccagaagagggggactggcagttggggggcctctgagctgcaaaagacaggattttccccttttttccagctggccgccaagcactgccggaggccagtgatcaatgctggggatggggtcggagagcaccccacccaggccctgctggacatcttcaccatccgtgaggagctgggaactgtcaatggcatgacggtgagggtggtggcagggtttggatccctgccaggggacgatctagagagggaggcaggaagtggttaccccggtacaggacagctgcatcaaggaggccttcattctgctccagaggcttttaaaagcttggaaatgatgtcggggggcactcagtctgggatccctgtggtgactggattcctctcctagatcacgatggtgggtgacctgaagcacggacgcacagtacattccctggcctgcctgctcacccagtatcgtgtcagcctgcgctacgtggcacctcccagcctgcgcatgccacccactgtgcgggccttcgtggcctcccgcggcaccaagcaggtgagaccctcacagccctgcctggaagccatggagatgtgggttgggcagtcagagcccagcgctgcatccaccatggctctcctcaccctccaggaggaattcgagagcattgaggaggcgctgcctgacactgatgtgctctacatgactcgaatccagaaggaacgatttggctctacccaggagtacgaagctgtgagtgctgggcttgaggaagaagccagggctgctgccgtagggcatcagatatgaggacagaaaggctgggctgagggctgggtcagagctgttaaacttcacatctgtcaattgccatagctgcatgtgggtgtggaggggaccccagtggagcccagacttgtgtcctctgtagccactcctaccccaaggcactaatggggaccccatctgctttgcagtgctttggtcagttcatcctcactccccacatcatgacccgggccaagaagaagatggtggtgatgcacccgatgccccgtgtcaacgagataaggtggtgcagcatcagagtcagagactgcctcggggctggtggacgggaggagacttagtcctggacaagccatccatgggctgcacgataacacttcctttttttttttttttttttttgcagcgtggaagtggactcggatccccgcgcagcctacttccgccaggctgagaacggcatgtacatccgcatggctctgttagccaccgtgctgggccgtttctagggcctggcttcctcagcctcttctctttaggcccagctgctgggcaaggaattccagtgcctcctacgggggcagcacacttagatattcctggacatccagatagctcacatgtgctgaccacacttcaggctctggactggagctctctggcatgggggtggggcctcagatgctggggcccagtctgccccatcttcattcctgcaccttaaacctgtacagtcatttttctactgacttaataaacagccgagctgtcccttgatgctgagtgtagtagaacagagctttcttttagaaaattgagcagattcccaaattataagagcagcctcaccaggcagggctctggctagggctgcgtgcccacactcggcattttcacactcgtgactctttgggactcggcaggagcgtgttaa

SEQ ID NO: 16 - protein, 2225 aa, Homo sapiens
MAALVLEDGSVLRGQPFGAAVSTAGEVVFQTGMVGYPEALTDPSYKAQILVLTYPLIGNYGIPPDEMDEFGLCKWFESSGIHVAALVVGECCPTPSHWSATRTLHEWLQQHGIPGLQGVDTRELTKKLREQGSLLGKLVQNGTEPSSLPFLDPNARPLVPEVSIKTPRVFNTGGAPRILALDCGLKYNQIRCLCQRGAEVTVVPWDHALDSQEYEGLFLSNGPGDPASYPSVVSTLSRVLSEPNPRPVFGICLGHQLLALAIGAKTYKMRYGNRGHNQPCLLVGSGRCFLTSQNHGFAVETDSLPADWAPLFTNANDGSNEGIVHNSLPFFSVQFHPEHQAGPSDMELLFDIFLETVKEATAGNPGGQTVRERLTERLCPPGIPTPGSGLPPPRKVLILGSGGLSIGQAGEFDYSGSQAIKALKEENIQTLLINPNIATVQTSQGLADKVYFLPITPHYVTQVIRNERPDGVLLTFGGQTALNCGVELTKAGVLARYGVRVLGTPVETIELTEDRRAFAARMAEIGEHVAPSEAANSLEQAQAAAERLGYPVLVRAAFALGGLGSGFASNREELSALVAPAFAHTSQVLVDKSLKGWKEIEYEVVRDAYGNCVTVCNMENLDPLGIHTGESIVVAPSQTLNDREYQLLRQTAIKVTQHLGIVGECNVQYALNPESEQYYIIEVNARLSRSSALASKATGYPLAYVAAKLALGIPLPELRNSVTGGTAAFEPSVDYCVVKIPRWDLSKFLRVSTKIGSCMKSVGEVMGIGRSFEEAFQKALRMVDENCVGFDHTVKPVSDMELETPTDKRIFVVAAALWAGYSVDRLYELTRIDRWFLHRMKRIIAHAQLLEQHRGQPLPPDLLQQAKCLGFSDKQIALAVLSTELAVRKLRQELGICPAVKQIDTVAAEWPAQTNYLYLTYWGTTHDLTFRTPHVLVLGSGVYRIGSSVEFDWCAVGCIQQLRKMGYKTIMVNYNPETVSTDYDMCDRLYFDEISFEVVMDIYELENPEGVILSMGGQLPNNMAMALHRQQCRVLGTSPEAIDSAENRFKFSRLLDTIGISQPQWRELSDLESARQFCQTVGYPCVVRPSYVLSGAAMNVAYTDGDLERFLSSAAAVSKEHPVVISKFIQEAKEIDVDAVASDGVVAAIAISEHVENAGVHSGDATLVTPPQDITAKTLERIKAIVHAVGQELQVTGPFNLQLIAKDDQLKVIECNVRVSRSFPFVSKTLGVDLVALATRVIMGEEVEPVGLMTGSGVVGVKVPQFSFSRLAGADVVLGVEMTSTGEVAGFGESRCEAYLKAMLSTGFKIPKKNILLTIGSYKNKSELLPTVRLLESLGYSLYASLGTADFYTEHGVKVTAVDWHFEEAVDGECPPQRSILEQLAEKNFELVINLSMRGAGGRRLSSFVTKGYRTRRLAADFSVPLIIDIKCTKLFVEALGQIGPAPPLKVHVDCMTSQKLVRLPGLIDVHVHLREPGGTHKEDFASGTAAALAGGITMVCAMPNTRPPIIDAPALALAQKLAEAGARCDFALFLGASSENAGTLGTVAGSAAGLKLYLNETFSELRLDSVVQWMEHFETWPSHLPIVAHAEQQTVAAVLMVAQLTQRSVHICHVARKEEILLIKAAKARGLPVTCEVAPHHLFLSHDDLERLGPGKGEVRPELGSRQDVEALWENMAVIDCFASDHAPHTLEEKCGSRPPPGFPGLETMLPLLLTAVSEGRLSLDDLLQRLHHNPRRIFHLPPQEDTYVEVDLEHEWTIPSHMPFSKAHWTPFEGQKVKGTVRRVVLRGEVAYIDGQVLVPPGYGQDVRKWPQGAVPQLPPSAPATSEMTTTPERPRRGIPGLPDGRFHLPPRIHRASDPGLPAEEPKEKSSRKVAEPELMGTPDGTCYPPPPVPRQASPQNLGTPGLLHPQTSPLLHSLVGQHILSVQQFTKDQMSHLFNVAHTLRMMVQKERSLDILKGKVMASMFYEVSTRTSSSFAAAMARLGGAVLSFSEATSSVQKGESLADSVQTMSCYADVVVLRHPQPGAVELAAKHCRRPVINAGDGVGEHPTQALLDIFTIREELGTVNGMTITMVGDLKHGRTVHSLACLLTQYRVSLRYVAPPSLRMPPTVRAFVASRGTKQEEFESIEEALPDTDVLYMTRIQKERFGSTQEYEACFGQFILTPHIMTRAKKKMVVMHPMPRVNEISVEVDSDPRAAYFRQAENGMYIRMALLATVLGRF

SEQ ID NO: 17 - DNA, 16 bp, Homo sapiens
gtaattcatgtaagtt

SEQ ID NO: 18 - DNA, 11 bp, Homo sapiens
agtcccctttg

SEQ ID NO: 19 - DNA, 11 bp, Homo sapiens
tgtgtgtccgc

SEQ ID NO: 20 - DNA, 15 bp, Homo sapiens
atggtggacttccag

SEQ ID NO: 21 - protein, 5 aa, Homo sapiens
MVDFQ

SEQ ID NO: 22 - protein, 17 aa, Homo sapiens
MAGMVDFQDEEQVKSFL

SEQ ID NO: 23 - protein, 17 aa, Macaca mulatta
MAGLVDFQDEEQVKSFL

SEQ ID NO: 24 - protein, 17 aa, Unknown
  Elephantidae Gray
MAGVVDFQDEEQVKSFL

SEQ ID NO: 25 - protein, 17 aa, Unknown
  Didelphidae Gray
MAGVVDFEDEEQVASFL

SEQ ID NO: 26 - protein, 17 aa, Gallus gallus domesticus
MAGLIDFGDEEEVRSYL

SEQ ID NO: 27 - protein, 17 aa, Silurana tropicalis
MAGLVDLKNEEEVKEYL

SEQ ID NO: 28 - protein, 17 aa, Danio rerio
MAGLINFEDEQEVKQFL

SEQ ID NO: 29 - DNA, 12 bp, Homo sapiens
tgctatcggctg

SEQ ID NO: 30 - protein, 4 aa, Homo sapiens
CYRL

SEQ ID NO: 31 - protein, 10 aa, Homo sapiens
PDGCYRLVDY

SEQ ID NO: 32 - protein, 10 aa, Mus musculus
PEGCYRLVDY

SEQ ID NO: 33 - protein, 10 aa, Silurana tropicalis
PDGCNRLVDY

SEQ ID NO: 34 - protein, 10 aa, Danio rerio
PEGCHRLVDY
